(19) United States
(12) Patent Application Publication
(10) Pub. No.: US 2016/0002710 A1
(43) Pub. Date: Jan. 7, 2016

(54) REPORTER PHAGE AND DIAGNOSTIC FOR BACTERIA

(71) Applicant: Guild Associates, Inc., Dublin, OH (US)

(72) Inventors: David A. Schofield, Hollywood, SC (US); Darren J. Wray, Charleston, SC (US); Ian J. Molineux, Bee Cave, TX (US)

(21) Appl. No.: 14/668,194

(22) Filed: Mar. 25, 2015

Related U.S. Application Data
(60) Provisional application No. 61/970,031, filed on Mar. 25, 2014.

(51) Int. Cl. C12Q 1/68

(52) U.S. Cl. CPC C12Q 1/689; C12Q 2600/158

(57) ABSTRACT

The present disclosure relates to compositions, methods, systems and kits for the detection of microorganisms of the Shigella species, including S. flexneri, S. dysenteriae, S. sonnei, and S. boydii. The disclosure relates to recombinant phage operable to infect a S. flexneri microorganism, the phage comprising a detectable reporter. Detection systems of the disclosure may comprise a phage operable to infect a S. flexneri microorganism, and may comprise a reporter nucleic acid expressible upon infection of a S. flexneri microorganism by the phage. The system may be operable to detect the expression of the reporter. A detectable reporter may comprise any gene having bioluminescent, colorimetric and/or visual detectability. Live and infectious S. flexneri microbes may be detected by the compositions, methods, systems and kits described herein.

### CROSS REFERENCE TO RELATED APPLICATIONS

[0001] The present application claims priority under 35 U.S.C. §119(e) of U.S. Patent Provisional Application Ser. No. 61/970,031, filed Mar. 25, 2014, the disclosure of which are incorporated by reference herein.

### GOVERNMENT RIGHTS

[0002] This invention was made with government support under NIH Grant Number 4R33AI100164-04, titled “Bioluminescent Reporter Phage for the Diagnostic Detection of Shigellosis”. The U.S. Government has certain rights in the invention.

### BACKGROUND

[0003] Acute diarrheal diseases are the second leading cause of death among infectious diseases. Of these, shigellosis, also known as bacterial dysentery, is a global human health problem. Shigellosis, caused by the genus Shigella, is a significant cause of morbidity and mortality, accounting for 164 million cases worldwide and 1.1 million deaths annually, most notably among children under 5 years old. The vast majority of infections occur in developing countries where poor sanitary conditions, contaminated food and water supplies, malnourishment, and overcrowded conditions are prevalent. However, shigellosis is also common in the U.S., accounting for approximately 450,000 cases per year. Shigellosis is highly contagious; the infectious dose has been estimated at 10-100 cells, and is usually transmitted by the fecal-oral route. Symptoms include loose stools mixed with blood and mucus, which are usually accompanied by abdominal cramps and fever. In the majority of cases, the disease is self-limiting. However, in severe cases, shigellosis is life-threatening and requires appropriate medication.

[0004] Shigella is a member of the Enterobacteriaceae. Organisms are small, non-motile, fastidious Gram-negative facultative anaerobic bacilli. The four species of Shigella are divided into a number of different serotypes: S. dysenteriae types 1-13; S. flexneri types 1-15; S. sonnei type 1, and S. boydii types 1-18. Of these, S. flexneri type 2a, and S. dysenteriae type 1 are responsible for the majority and the most severe infections, respectively.

[0005] Mucus and blood in stool samples are typical features of bacterial dysentery; however, the diarrheal stage of infection cannot be distinguished clinically from other bacterial, viral, and protozoan infections. Presumptive identification of Shigella infection can be made by culturing bacterial samples onto semi-selective medium, e.g., MacConkey or deoxycholate citrate agar, or highly selective media such as xylose-lysin deoxycholate, hektoen enteric, or Salmonella-Shigella agar. Confirmatory identification using real-time PCR analysis can expedite detection with sensitivity limits of detection as low as 10³ CFU/g of stool. However, the cost of molecular assays can be prohibitive to their adoption, especially to developing countries where bacterial dysentery is endemic.

[0006] Due to their inherent bacterial specificity, bacteriophages (phages) have been developed as diagnostic devices, in particular as reporters, for bacterial pathogens including Mycobacterium tuberculosis, Yersinia pestis, Bacillus anthracis, Salmonella enterica, and Listeria monocytogenes. There is a need for a reporter phage assay as a diagnostic tool for detection of the leading causes of bacterial dysentery.

### BRIEF DESCRIPTION OF DRAWINGS

[0007] FIG. 1 is a schematic illustration of LuxAB genomic location according to one example of the claimed technology.

[0008] FIG. 2 shows the PCR identification of Shfl25875::luxAB according to one example of the claimed technology.

[0009] FIG. 3 shows a growth curve of S. flexneri culture infected with Shfl25875 according to one example of the claimed technology.

[0010] FIG. 4 is a chart showing the signal response time of S. flexneri culture mixed with Shfl25875::luxAB according to one example of the claimed technology.

[0011] FIG. 5 is a chart showing the sensitivity limit detection of one example of the claimed technology.

[0012] FIG. 6 is a chart showing antibiotic susceptibility profiles of S. flexneri ATCC 25875 generated with ampicillin.

[0013] FIG. 7 is a chart showing antibiotic susceptibility profiles of S. flexneri ATCC 25875 were generated with ciprofloxacin.

[0014] FIG. 8 is a chart showing reporter phage detection of S. flexneri from spiked human stool.

[0015] FIG. 9 is a chart showing detection of S. sonnei 9290 and S. flexneri 7-3510 with Sdys9750::luxAB according to another example of the claimed technology.

[0016] FIG. 10 is a chart showing detection of S. sonnei 9290 and S. flexneri 7-3510 with Sdys12039::luxAB according to still another example of the claimed technology.

### DESCRIPTION

[0017] For the purposes of promoting an understanding of the principles of the claimed technology and presenting its currently understood best mode of operation, reference will now be made to the embodiments illustrated in the drawings and specific language will be used to describe the same. It will nevertheless be understood that no limitation of the scope of the claimed technology is thereby intended, with such alterations and further modifications in the illustrated device and such further applications of the principles of the claimed technology as illustrated therein being contemplated as would normally occur to one skilled in the art to which the claimed technology relates.

[0018] The disclosed technology describes the development of a reporter phage assay as a diagnostic tool for detection of the leading cause of bacterial dysentery, S. flexneri. In one example, wastewater samples were screened for the presence of phages displaying broad host range. One phage, Shfl25875, which displayed the broadest S. flexneri tropism, was characterized by genome sequencing, and was then engineered with the genes encoding bacterial luciferase to generate a ‘light-tagged’ reporter phage. Shfl25875::luxAB rapidly transduces bioluminescence to S. flexneri with high sensitivity, thereby providing a useful diagnostic reagent. Furthermore, as shigellosis is most problematic in developing countries where health-care expenditures are extremely limited, the low cost of phage-based assays are particularly attractive.

### Bacterial Strains and Culture Conditions.

[0019] Bacterial strains were purchased from the NIH Biodefense and Emerging Infections Research Resources Repository (Shigella spp., S. enterica, L. monocytogenes, Yersinia enterocolitica, Klebsiella pneumoniae, Escherichia coli), the American Type Culture Collection (Shigella spp. and K. pneumoniae), and the Bacillus Group Stock Center (Bacillus cereus). Some Shigella isolates were from outbreaks in South America (Guatemala and Chile). Bacteria were grown in Luria-Bertani (Enterobacteriaceae) or Brain Heart Infusion (B. cereus and L. monocytogenes) media at 37° C. with aeration. Unless otherwise stated, isolated colonies were incubated in 2 mL of media for 18-24 h to generate saturated cultures. Cultures were then diluted 1:50 to 1:200 in fresh media and incubated until A600 of 0.2 (for bioluminescent assays) or 0.4 (for phage titering and host range studies). Where indicated, bacteria were enumerated by determining colony-forming units (CFU) after 18-24 h growth at 37° C.

Isolation of Shigella Phages from Environmental Sources and Phage Propagation.

[0020] Raw wastewater samples (40 mL aliquots) were processed immediately by the addition of NaCl (final 0.7 M) and CaCl₂ (final 5 mM) with mixing for 30 min at 30° C. Particulate matter and bacteria were removed by centrifugation (4,000×g, 10 min, 4° C.), and the supernatant was made 9% (w/v) polyethylene glycol 8,000 to precipitate phages. After 3 h at 4° C. with gentle mixing, the precipitate was collected by centrifugation (11,000×g, 30 min, 4° C.) and was then gently resuspended in SM buffer supplemented with 5 mM CaCl₂ before storing at 4° C.

[0021] Shigella phages were isolated using S. flexneri serotype 2a and S. dysenteriae serotype 1 as hosts using soft agar overlays. Individual plaques were picked, serially diluted in SMC buffer and thrice plaque purified to ensure clonality of the isolated phage. Phages were then amplified in liquid culture using growing cultures until lysis, and phage lysates were clarified by centrifugation and filtration.

[0022] Host range determination of phages was performed by spotting phage dilutions using Shigella spp. (73 strains), closely related Enterobacteriaceae species (39 strains), and clinically relevant non-Enterobacteriaceae (10 strains).

### Phage DNA Sequencing.

[0023] Phage DNA was prepared and sequencing was performed by the Medical University of South Carolina Proteogenomics Facility using Ion Torrent Sequencing. The genome sequence of Shfl25875 is found at GenBank KM407600.

Construction and Generation of Recombinant Shfl::luxAB Reporter Phage.

[0024] Vibrio harveyi luxA and luxB genes were used as the reporter and were targeted for integration downstream of, and in the same orientation as gene 32 at position 146,610 by within the phage genome (FIG. 1). LuxAB was targeted for integration into the phage genome using homologous recombination. Recombinant luxAB-phage were screened and selected for based on the ability of infected cultures to acquire a bioluminescent phenotype.

### Recombinant Phage Verification.

[0025] To identify the presence of luxAB, and to confirm that integration had occurred at the correct site, cell-free phage supernatants were analyzed by PCR. Internal primers were designed to detect luxB (5′ primer ATCGACCAACGGATTCTCAG; 3′ primer ACTTCTTTGCTCGTCGCATT, product size of 184 bp). Primers were also designed to span the 5′ and 3′ integration junction sites (5′: 5′ primer CTTGTCCGTTTGAAGGTGCT; 3′ primer GCTTTGCCCAGATTAACCAA, 511 bp product: 3′: 5′ primer AGCTCGCGTGTATTTGGAAG; 3′ primer ACCACCGGCAGAACATACAG, 573 bp product). Each primer set was designed to ensure that primer binding occurred both inside and outside the original integration cassette. PCR analysis was performed as recommended by the Taq DNA polymerase manufacturer (New England Biolabs).

### Antibiotic Susceptibility Assays.

[0026] The ability of the reporter phage to confer a bioluminescent signal to S. flexneri in the presence of ciprofloxacin or ampicillin (Sigma Aldrich) was compared to the Clinical Laboratory Standards Institute (CLSI) broth microdilution method. Cells (5×10⁵ CFU/mL) and antibiotics were prepared in cation-adjusted Mueller Hinton broth according to CLSI methodology. Cells were incubated with ampicillin (0.06 to 8 μg/mL) or ciprofloxacin (0.0005 to 0.12 μg/mL) in microtiter plates, incubated at 35° C., and assessed for growth (A₆₂₅) after 20 h as per the CLSI protocol. The MIC using the internal QC strain E. coli ATCC 25922 for ampicillin and ciprofloxacin was 2 and 0.015 μg/mL, respectively, both within the acceptable range. The same Shigella inoculum was grown for 5 h at 35° C. in the presence of antibiotics, infected with Shfl::luxAB, and bioluminescence assayed after 20 min.

Detection of S. flexneri in Spiked Stool Samples.

[0027] Human stool samples from healthy individuals were sterilized by autoclaving, and spiked (10 μL) with S. flexneri (10³-10⁶ CFU/g). Stool samples (n=3 each for both the no-cell control and spiked samples) were processed by mixing with 9 mL of LB, vortexing vigorously for 5 s, and incubating at 37° C. with aeration. After 4 h, aliquots were infected with Shfl25875::luxAB and analyzed for bioluminescence.

### Bioluminescence Assays.

[0028] Unless otherwise stated, Shfl25875::luxAB (3×10⁸ PFU/mL final) and cells were mixed and incubated at the designated temperatures for set times. ‘Flash’ bioluminescence was measured using a luminometer. Cultures (195 μl per reading) were injected with n-decanal and read. Controls consisted of both cells alone and phage alone. Bioluminescence is depicted as relative light units (RLU) and the data presented are the average of three experiments SD unless otherwise stated. Statistical significance was determined using Student's t-test (p<0.05).

Isolation of Phages with a Broad S. flexneri Tropism.

[0029] S. flexneri serotype 2a is responsible for the majority of shigellosis worldwide. In addition, the occurrence of drug-resistant isolates for the epidemic S. dysenteriae serotype 1 is increasingly common. Phages were therefore isolated using S. flexneri serotype 2a, and S. dysenteriae serotype 1 as hosts. Over 100 phages displaying differences in plaque morphology (size, turbidity, clarity), titer, and stability were isolated and were then screened for host range against various S. flexneri serotypes and S. dysenteriae serotype 1. The vast majority of phages displayed a narrow host range; able to grow on the serotype used for isolation, but exhibited a reduced efficiency of plating (eop) on other serotypes (data not shown). However, one phage (named Shfl25875) grew on 28/29 of S. flexneri and all twelve S. dysenteriae type 1 strains with an eop of >0.1, and displayed an inability to grow on non-Shigella spp. (Table 1, and data not shown). Shfl25875 produces clear ˜3 mm plaques on S. flexneri ATCC 25875 and normally yields titers of >10¹⁰ PFU/mL in plate stocks. No significant loss in titer was noted after storage for 8 months at 4° C. Shfl25875 was therefore selected for further characterization, including genome sequencing and reporter phage development.

TABLE 1
Shigella inclusivity host range analysis with Shfl25875

| | | Number of strains |
|---|---|---|
| Species | Serotype | infected/total tested |
| S. flexneri | 1a | 2/2 |
| S. flexneri | 1b | 1/1 |
| S. flexneri | 2a | 16/16 |
| S. flexneri | 2b | 1/1 |
| S. flexneri | 3 | 1/1 |
| S. flexneri | 4 | 3/3 |
| S. flexneri | 5 | 1/1 |
| S. flexneri | 6 | 1/2 |
| S. flexneri | Y | 1/1 |
| S. flexneri | Unknown | 1/1 |
| S. dysenteriae | Type 1 | 12/12 |

“Infected” defined by having an efficiency of plating of >0.1 relative to host strain S. flexneri

### Genome Analysis.

[0030] Assembly of the Ion-Torrent output sequence of the Shfl25875 genome generated a single contig of 169,062 bp. The closest match in GenBank is RB69 (GenBank AY303349.1), a 167,560 bp coliphage genome with which Shfl25875 shared ˜97% sequence identity. RB69 is a member of the Tevenvirinae and is thus a T4-like phage, and homologs of all known essential, and most characterized non-essential genes of RB69 are both present in and syntenic with Shfl25875. The major differences are that Shfl25875 encodes a putative internal head protein IpII, which is present in only some members of the T4-like phages, and a putative segD-like homing endonuclease, a type of element common to many T4-like phages, but completely lacking in RB69. It also contains two orfs between cd and cd.2, one of which codes for a protein of the AroG superfamily, with 69% similarity to S. dysenteriae phospho-2-dehydro-3-deoxyheptonate aldolase. Conversely, Shfl25875 lacks the RB69 protease-inhibitor gene pin. The most closely related phage whose host is described as S. flexneri is Shfl2 (GenBank HM035025.1) with ˜80% sequence identity to Shfl25875. The long tail fibers, responsible for initial Shfl25875 adsorption to S. flexneri are, however, more similar to certain T4-like coliphages than to Shfl2.

Integration of the luxAB Reporter into the Phage Genome.

[0031] LuxAB was inserted into the phage genome by homologous recombination without deleting any phage DNA. The genome size of Shfl25875::luxAB is thus 2,108 bp greater than its parent phage Shfl25875. The inserted DNA reduces the length of the terminal redundancy associated with all T4-like phage genomes; redundancy in the T4 genome was estimated at ˜5 kb, and assuming a comparable length for Shfl25875, luxAB insertion causes a 40% reduction. However, no significant growth defect of Shfl25875::luxAB has yet been noted (see below). PCR was used to verify the presence of luxAB in the recombinant phage, and that it had integrated correctly into the targeted site (FIG. 2). PCR of phage lysates using primers designed to amplify a portion of luxB, and separately, to span the 5′ and 3′ junctions of luxAB when integrated into the phage genome, generated the expected size PCR products.

[0032] A one step growth curve compares the fitness of Shfl25875::luxAB to its parent. Both phages exhibit similar growth profiles (FIG. 3), including a 25-30 min latent period and average burst size (90 and 76, respectively for Shfl25875 and Shfl25875::luxAB) typical values for T4-like phages. These data further show that insertion of luxAB into Shfl25875 did not negatively affect fitness.

Shfl25875::luxAB-Mediated Detection of S. flexneri.

[0033] The reporter phage transduces bioluminescence to S. flexneri within 20 min of infection (FIG. 4). A significant increase in signal resulted, indicating that Shfl25875::luxAB expresses luxAB at significant levels soon after infection. The signal reaches its maximum level by approximately 60 min, and incubation for more than 120 min resulted in a drop in signal. Sensitivity limits of detection using serial dilutions of S. flexneri show dose-dependent characteristics, with increasingly higher number of cells displaying proportionally higher signals (FIG. 5). The limit of detection was approximately 10² CFU/mL within 60 min of infection (p<0.05). Collectively, the data indicate that Shfl25875::luxAB rapidly transduces a strong bioluminescent phenotype to S. flexneri in pure culture.

### Inclusivity and Specificity of the Reporter Phage.

[0034] We determined whether Shfl25875::luxAB could transduce a signal response to all four Shigella species, to closely related non-Shigella Enterobacteriaceae (E. coli, S. enterica, Y. enterocolitica, K. pneumoniae) and to more distantly related but clinically relevant enteric pathogens (B. cereus, L. monocytogenes) (Table 2). Shfl25875::luxAB detected 28/29 S. flexneri strains of different serotypes and detected 12/12 S. dysenteriae serotype 1 strains. Shfl25875::luxAB also detected 24/27 S. sonnei serotype 1 isolates. Two of 10 E. coli strains (BEI NR-3 and NR-12) elicited signals that were approximately 10- and 100-fold lower than with Shigella but only 1 of 29 strains of other Enterobacteriaceae (Y. enterocolitica, S. enterica, and K. pneumoniae) resulted in a positive signal response (S. enterica strain); this was also 100-fold lower than with the Shigella host strain. As may be expected, the distantly related species B. cereus and L. monocytogenes did not produce signals above background.

TABLE 2
Specificity of Shfl25875::luxAB phage among Shigella
species closely related species and non-related but
clinically relevant pathogens.

| | Light-positive | |
|---|---|---|
| | strains/total tested^{e} | Notes |
| Shigella spp. | | |
| S. flexneri^{a} | 28/29 | One serotype 6 strain was |
| | | negative |
| S. dysenteriae^{b} | 12/12 | All serotype 1 strains |
| S. sonnei | 24/27 | |
| S. boydii | 0/5 | Serotypes 1-5 |
| Enterobacteriaceae | | |
| E. coli^{c} | 2/10 | 2 positive strains 10 to 100- |
| | | fold lower than S. flexneri |
| K. pneumoniae^{d} | 0/10 | Background |
| S. enterica | 1/9 | 1 positive strain >100-fold |
| | | lower signal than S. flexneri |
| Y. enterocolitica | 0/10 | |
| Non- | | |
| Enterobacteriaceae | | |
| B. cereus | 0/5 | Background |
| L. monocytogenes | 0/5 | Background |

^{a}S. flexneri comprising serotypes 1a, 1b, 2a, 2b, 3, 4, 4a, 4b, 5, 6, Y
^{b}S. dysenteriae serotypes 2 through 12 only found 2 positive strains out of 12 analyzed (data not shown)
^{c}Various O-antigen strains such as O157:H7, O145:H2, O111, O121, and a uropathogenic strain
^{d}Including clinical strains isolated from stool and urine
^{e}‘Light positive strains’ defined by phage-infected strains exhibiting a bioluminescence signal response of >10³-fold over background controls

### Rapid Determination of Antibiotic Susceptibility.

[0035] A phage-mediated bioluminescent signal response is strictly correlated to cell fitness. Therefore, the ability of Shfl25875::luxAB to confer bioluminescence signal to Shigella spp. in the presence of antibiotics was compared to the standard CLSI broth microdilution method. Standard antibiotics used for determining susceptibility of Shigella isolates include ampicillin and ciprofloxacin. Cells were incubated with a range of antibiotic concentrations in microtiter plates, incubated at 35° C., and assessed for growth (A₆₂₅) after 20 h as per the CLSI protocol, or bioluminescence following infection by Shfl25875::luxAB. The bioluminescence signal mirrored the growth profile in the presence of ampicillin or ciprofloxacin (FIGS. 6-7). At antibiotic concentrations that had little to no effect on growth, the signal from the reporter phage was near maximum. Conversely, at antibiotic concentrations that were at the minimum inhibitory concentrations (1 and 0.015 μg/mL for ampicillin and ciprofloxacin, respectively) or higher, bioluminescence was at or close to background. However, the CLSI protocol requires 16-20 h to complete while the reporter phage only requires ˜5 h. Shfl25875::luxAB not only diagnoses shigellosis but also simultaneously gathers antibiotic susceptibility data.

Phage-Mediated Detection of S. flexneri in Human Stool.

[0036] The standard clinical diagnostic specimen for bacterial dysentery is stool. Whether Shfl25875::luxAB could transduce bioluminescence to S. flexneri in deliberately spiked stool samples was tested. A discernable signal-to-noise level was observed 30 min after infection (FIG. 8). As with pure cultures, Shfl25875::luxAB exhibited typical dose-response characteristics with a sensitivity of detection of 10³ CFU/g (p<0.05). This level of sensitivity is compatible with clinical samples as Shigella spp. are shed in large numbers during the acute phase of infection.

### Overview

[0037] The isolation of Shigella phages from environmental waters in developing countries where bacterial dysentery is common has been described numerous times in the literature. The selection of the T4-like phage Shfl25875 for diagnostic development was based on its broad host range and its obligate lytic growth characteristic; Shfl25875 plaques on most S. flexneri serotypes and S. dysenteriae serotype 1 strains, but did not grow on most non-Shigella Enterobacteriaceae. That Shfl25875 infects some E. coli strains is not surprising given their very close relationship. Taxonomy places the entire Shigella genus within the species E. coli, and restriction-modification was discovered more than 60 years ago using phages that grow on both E. coli and S. dysenteriae.

[0038] In one example, Shfl25875::luxAB elicited a 10⁵-fold increase in bioluminescence to S. flexneri within 20 min. This strong response may be attributed to the position of the reporter within the phage genome. A priori, maximal expression of a phage-carried reporter gene occurs from the strongest promoters. In dsDNA phage genomes, these promoters usually direct expression of the structural genes, which code for proteins that are produced in greatest abundance in the infected cell. However, these promoters are usually activated late in infection, providing only a narrow time window for expression and function of a reporter gene construct. T4 gene 32 is transcribed throughout infection from several promoters, and its protein product acts stoichiometrically on ssDNA generated during phage DNA metabolism. Sequences corresponding to putative middle (mot-dependent) and late promoters were identified upstream of Shfl25875 gene 32, and the gene is followed by a putative terminator, as in T4. Transcriptional regulation of Shfl25875 gene 32 is comparable to that of its T4 counterpart, and thus that luxAB would be expressed at high levels if the cassette was inserted between gene 32 and its transcriptional terminator. This high level expression resulted in a sensitivity limit of detection of 300 CFU/mL in pure culture and ˜10³ CFU/g of spiked stool, suggesting that further development of Shfl25875::luxAB will result in a valuable diagnostic.

[0039] Importantly, simultaneously with diagnosis, Shfl25875::luxAB provides antibiotic susceptibility profiles because the phage uses the host's biosynthetic machinery to elicit bioluminescence. Although empiric antibiotic treatment has traditionally been the routine for shigellosis, this strategy is increasingly problematic due to antibiotic-resistant strains, the epidemic and pandemic S. dysenteriae serotype 1 strain in particular. Resistance to ampicillin, tetracycline, and nalidixic acid and other fluoroquinolones has been observed in various regions of the world. As CLSI protocols for determining antibiotic susceptibility requires 16-20 h, bioluminescence conferred by Shfl25875::luxAB significantly speeds up analysis. A similar strategy has been employed for the identification and drug susceptibility testing of M. tuberculosis isolates using recombinant mycobacteriophages.

[0040] There are currently 2 FDA-approved/cleared phage-based diagnostic assays, both of which use wild-type phage and are based on phage amplification; the phage lysis assay for B. anthracis and KeyPath™ Blood Culture Test for identifying Staphylococcus aureus and differentiating MRSA and MSSA.

### Alternative Insertion Location.

[0041] Targeted insertions between the scaffolding protein gene and major capsid protein gene were also attempted. The rationale is that the major capsid protein is the most abundant phage protein made after infection, and thus that mRNA levels in this region of the genome are also likely high. In a recombinant phage, luxAB are thus also to be expected to be highly transcribed. Inserted DNA fragments included a duplication of the late promoter sequence (TATAAATA), in order to ensure adequate transcription of the downstream gene 23; the late promoter and the complete natural intergenic sequence between genes 22 and 23, in case that short sequence was important for gene 23 expression. PCR of DNA found in lysates indicated that the expected recombination between the phage and the luxAB plasmids had occurred but luminescent phages were not found. As adequate numbers of plaques were screened, the reason for this failed attempt is unknown but may be hypothesized that the luxAB insert was deleterious because the amounts of gp22 (scaffold) and gp23 (capsid) actually synthesized in a recombinant phage was imbalanced, causing interference with the phage assembly process.

### Alternative Phages Sdys9752 and Sdys12039

[0042] The previous examples isolated, characterized, and genetically engineered a Shigella phage named Shfl25875 which could be used for the detection of certain Shigella bacterial strains. The Shigella genus is classified by four serogroups: S. dysenteriae (15 serotypes); S. flexneri (six serotypes); S. boydii (19 serotypes); S. sonnei (1 serotype). While the Shfl25875 phage infected many Shigella serogroups, it did not infect them all. Two additional phages, named Sdys9752 and Sdys12039, were also developed using similar techniques to those previously described with respect to Shfl25875. These alternative phages complement the strains of Shigella infected by Shfl25875. For example:

[0043] 1. Shfl25875 infects the majority (28 out of 29) of S. flexneri strains. The one Shfl25875-resistant strain is susceptible to Sdys9752.

[0044] 2. Shfl25875 infects all (12/12 strains) S. dysenteriae type 1 strains, but shows poor infectivity (2 out of 12) against the other S. dysenteriae types (2 through 12). In contrast, Sdys9752 does not infect type 1 strains, but infects 5 of 12 type 2-12 strains. In addition, Sdys12039 infects 9 of 12 S. dysenteriae type 2-12 strains. In combination, these 3 phages infect nearly all (22/24) S. dysenteriae strains tested.

[0045] 3. Shfl25875 infects 24 out of 27 S. sonnei strains tested. The three Shfl25875 resistant S. sonnei strains are susceptible to either or both of Sdys9752 and Sdys12039.

[0046] 4. Shfl25875 does not infect the 5 S. boydii strains in our collection. However, Sdys9752 and Sdys12039 infects 4 out of 5 of these strains.

[0047] The Sdys9752 and Sdys12039 phages were molecularly engineered to generate reporter phages using techniques that were similar to that described for Shfl25875. In both cases, the luxAB reporter genes were inserted into non-coding regions of the genomes by homologous recombination without removing any phage DNA and thus increased the overall genome sizes by 2,108 bp. PCR analysis was used to verify the presence of luxAB in the recombinant phages, and that luxAB had integrated into the correct predicted site in the phage genome (data not shown). PCR analysis of phage lysates using primers designed to amplify a section of luxB, and to span the 5′ and 3′ junctions of luxAB integration into the phage genomes, generated the correct sized PCR products as expected. This indicated: (i) the presence of the reporter, and (ii) that the luxAB cassette had integrated at the correct genome sites as expected.

[0048] The ability of Sdys9752::luxAB and Sdys12039::luxAB to transduce a bioluminescent phenotype, and hence detect Shigella strains was analyzed (results shown in FIGS. 9-10). As shown in FIGS. 9-10, S. sonnei 9290 and S. flexneri 7-3510 were grown at 37° C. in LB broth, and mixed with Sdys9750::luxAB or Sdys12039::luxAB, respectively. Infected cultures were incubated at 37° C. and bioluminescence was measured over time following the addition of substrate n-decanal. Numbers are the mean (n=3)±SD. Reporter phage (10⁸ PFU/mL final) and cells were mixed and ‘flash’ bioluminescence was measured following the addition of the substrate decanal using a GLOMAX® 96 Microplate Luminometer (registered trademark of Promega Corporation of Madison, Wis.). Strong (10⁵-fold increase in signals over background) and rapid signals were detected 20 min after infection with both reporter phages. These data indicating that the reporters were able to infect, and express luxAB to significant levels in a very short period of time. Similar results were obtained with other Shigella strains.

[0049] The current configuration of the detection device requires the addition of an aldehyde substrate (e.g., n-decanal) in order to generate the bioluminescent signal response. In this configuration, the luciferase enzyme (encoded by luxAB) in the presence of flavin mononucleotide (naturally present in the bacterial cell), oxygen and endogenously added decanal, catalyzes the reaction resulting in light as a by-product. In another configuration, the phage is engineered to encode the genes encoding luciferase, as well as the genes encoding the fatty acid reductase complex. These latter genes (luxCDE) encode the enzymes required for making the substrate, and thus generates an inclusive detection system that does not require exogenous substrate for light production.

[0050] The previous examples discuss using the disclosed technology in a laboratory setting to test human stool samples. It is understood that one of ordinary skill in the art would be able to adapt the disclosed technology for use in other settings such as in the field to test for the presence of target bacteria such as members of the Shigella genus. It is also understood that the disclosed technology could be adapted to test other materials such as other human clinical samples (mucus, rectal swabs, and the like), drinking water, food, soil, surfaces, and the like. In other examples, the phages described herein may be included as part of a Shigella microorganism detection kit having sample(s) of the phages described herein stored in suitable container(s) packaged with one or more testing containers for collecting and testing samples to be tested for the presence of Shigella microorganism.

[0051] While the claimed technology has been illustrated and described in detail in the drawings and foregoing description, the same is to be considered as illustrative and not restrictive in character. It is understood that the embodiments have been shown and described in the foregoing specification in satisfaction of the best mode and enablement requirements. It is understood that one of ordinary skill in the art could readily make a nigh-infinite number of insubstantial changes and modifications to the above-described embodiments and that it would be impractical to attempt to describe all such embodiment variations in the present specification. Accordingly, it is understood that all changes and modifications that come within the spirit of the claimed technology are desired to be protected.

What is claimed is:

1. A system for detecting Shigella, comprising:
a phage operable to infect a Shigella microorganism, the phage having a luxAB reporter nucleic acid configured and arranged to be expressed upon infection of the Shigella microorganism by the phage; and
a detector operable to detect expression of the luxAB reporter nucleic acid.

2. The system of claim 1, wherein the Shigella microorganism is selected from the group consisting of S. flexneri, S. dysenteriae, S. sonnei, S. boydii, and combinations thereof.

3. The detection system of claim 1, wherein the phage is selected from the group consisting of Shfl25875, Sdys9752, Sdys12039, and combinations thereof.

4. The detection system of claim 1, wherein the expression of the luxAB reporter is detected as bioluminescent light.

5. The detection system of claim 1, wherein the phage further includes a luxCDE reporter nucleic acid.

6. The detection system of claim 1, further comprising an aldehyde catalyst.

7. A kit, comprising:
a phage operable to infect Shigella microorganism, comprising a reporter configured and arranged to be expressed upon infection of the Shigella microorganism by the phage, in a suitable container; and
one or more containers to mix the phage with a test sample that may contain Shigella microorganism.

8. The kit of claim 7, further comprising an aldehyde catalyst in a suitable container.

9. The kit of claim 7, further comprising a bioluminescent detector.

10. The kit of claim 7, wherein the Shigella microorganism is selected from the group consisting of S. flexneri, S. dysenteriae, S. sonnei, S. boydii, and combinations thereof.

11. The kit of claim 7, wherein the phage is selected from the group consisting of Shfl25875, Sdys9752, Sdys12039, and combinations thereof.

12. A method of detecting the presence of Shigella microorganism, comprising:
a) providing a phage operable to infect a Shigella microorganism, the phage comprising a reporter configured and arranged to be expressed upon infection of the Shigella microorganism by the phage;
b) contacting a test sample with the phage; and
c) detecting expression of the reporter to indicate the presence of Shigella microorganism in the test sample.

13. The method of claim 12, wherein said detecting step is expressed as bioluminescent light.

14. The method of claim 12, wherein the Shigella microorganism is selected from the group consisting of S. flexneri, S. dysenteriae, S. sonnei, S. boydii, and combinations thereof.

15. The method of claim 12, wherein the phage is selected from the group consisting of Shfl25875, Sdys9752, Sdys12039, and combinations thereof.

16. The method of claim 12, wherein said contacting step further includes contacting an aldehyde catalyst with said test sample and said phage.

17. The method of claim 12, wherein the source of said test sample is selected from the group consisting of human clinical samples, water, food, soil, and combinations thereof.

18. An isolated DNA coding for a Shigella-detecting phage, said phage having the polynucleotide sequence set forth in SEQUENCE LISTING 1.

19. An isolated DNA coding for a Shigella-detecting phage, said phage having the polynucleotide sequence set forth in SEQUENCE LISTING 2.

20. An isolated DNA coding for a Shigella-detecting phage, said phage having the polynucleotide sequence set forth in SEQUENCE LISTING 3.

The application's sequence listing, which the Patent Office published only in electronic form, follows.

SEQUENCE LISTING (3 sequences)

SEQ ID NO: 1 - DNA, 169069 bp, Shigella Phage 1
  misc_feature (2)..(2): n is a, c, g, or t
  misc_feature (6)..(6): n is a, c, g, or t
sncstngttatttggccgcttccacggccttcatgaatttaacaatttgagcgacctgttctttagaaagagtaccacgtcgtcccatgtagtctgacacaatatgataattggtttcgaattcaataaccattttatcatcattatcgtaagcattatctttaagcttatcgaaaattttagcacacaattctaacttcttattcaggtctgtattagtagcacctgcgaatagattccatccccaacgattatttactgttgagagttttgcaaaatctttactgatttctttgtttttagagctaaaatacttactaaggaagttaagctcttcattacgagtaatatgattcaaataaggctgtgctctacgacttggtgatacatactcatcataatccactttatcgattagcgtaatatagtcattaattgatttttcgaacaagcattctacttcaccaagtttacgaactttcttagcaatctgtggacgaactacagtgaactctttaatacctgacaaatcagcaatacgggtcaagaaattggagtcatagttcaaccaacctttatctgcgtcaagacattcagcattagaacgattacgaactatagcataaccttggatttcatctgcttcacttgccggaataaagaggtcttctgatacccaaacatcgttttcattcttaaagaatcgatgagcacttggggatttaggacgaggctcattagtccgtttcctgacttcaatccatggcttaacaatttgtaaaagctctgaagtcttgtacatgttaatgctatcgccatcaaagataactttaaggcgttccagaagtttcattgcatcttcgtctgtagggtcaacgaatagtacgcttttaccaaaaccgcgtggaactttaccggataatttaacctcgtctttagacatttcaattgaattaagagctcgcattaatggaacgcgtcccttaacgtcgtcaataacaatttcaacgtttttaatgttaatgccaatcaggctgttaattgaaatggttgatgatgagctaccactttcacgaatacgacgaagacgaggggattcaacgatatcgtatacgacgccaagattacaccactcaggccccattttaaaacgtttgtacaactcagaataagttagttgttctttagagtatttcagtgattcaatattggacccggccttttccatgtatttacgagcggtatagccaagagaatcaatttcacggaacacatgacgcgggtatttacaatcaatccatttcttagaatcttcagcgaacaatttagcatcgatttctgcaacgcgtttatggatatttgctactgtacgtttatcaaatgacaatgcttcacgagacggagctacgtctagttcacccatagggaatttaatataagctgtagtgcatcgcgtcatcatccatgtttgttctttaataacacttccgattggatatacaataccgccataaacagccatgatattaccacgttcaccccatggagcttccttggctaaataaacatcatcgaattccgggaagtatttgatatctttaacaccacgaacttctgcaatatcacctagaggacgcataacatatgcaatttcggatgcgaacttttcaaaatcttctgggttaacaggcacaactacttctacacctgtacggtcatcaggacccattttatctacaaaggttggcttaatttgtggacctgtgtcatcttggtagattacgtaaccacgaacttcaccgttgtgataagacgtaaggttaaacgtatcggtatatgctaatggagctttagagccgagtccgaatccaccaatgaaatcgttactcgatgttttagttgaagcaaaatatgagttataaattcctggctcttcgtcattacctcgaatggtgaaatcgctcataccaggaccaaagtctcgaactacaaagcgtgggtctaaacgacctggagcctgaacaataaacttatcagtgcaaccattaagaatttgtccatcgatacagtttgtgattaattcacgtacacaagccaattctttgtttgtataaaggtcattagacaaaatcttataaactttgctattgccttgaatagtgaatgctgtgctcttaccgcctgaaccaataatcgtttctttagccgtttcaataatcatatttttctctcatcacaagttacgtttaaaaatttctgctacttcaagaagttcttctttagtagctgtatcggtttgtattttatatcgaatttctttaaagcgttctttaaaggactctgctgattcgatatcaaaaaatctttggataagccggaattcccggagcactgctttatcaaaaagttccaagtccacgttatatgttctcataatattctcttcagtagattcctagggcactattactaaagaccatataatctatcatcttatgtgtaatagtgccccaggcgattcaggatttacgctgtgaagattttatcccacatcgcaacaactgcatctcgattatacttcttccatactgcttcagcacgtttaactcgagcttcatatgtgtcagtgaattctaatacagcttttgtgtaaagcgcaactacttctttcttaggagtagaggaatcaatttctacacgcacagtatctgggtcgtattcgaatgtcgcatgaggataatccttaaaaactaactggattacagggacacctttagagatggcttcaatagaactattctctaccgtacccgtgtcaggacacgtattgataagtgctttagctgttttaagacgttccatgatttcactgtgtggagcatcaataataacaggatatttagctggtggtgcccatttactaggacagtatcctgcaccattttcgcctagtgctttaatcgcttcaagagcaacatcagtacgacgcattttagtgtcataacgttgtgcactaataatcagatcagtcgccggaagaacttcaggtttctcattcaaacaaataaccggataatcttcggcttcaaacaacggatttgctcgccaataatcataatcaattttgtcagtcagacctgaagtcatataacaatatttgcgttcaaattcacggaaggctttagtaggagcataactcttaccaccgttcttatgaatttgaatagtctggtcccaaatttgaacaatgccacgagataccggttcaaatggtgttgccataaaattcttatgaactttagaaagacctgcgtctttaattgcctgaacggttagtttggtcggttccattgtaacaacgaaatcgtactcattaatgccggctagttcaacaatcttacgagccatagtataactcatacctagactgaatttagtcagatgaccaacaggatgatgattaaccttccaatcaccaaatgtgtcattatcaaagccgatataatcaatatcagcaccgatggacacaagatatttcaacacatttaaatgtactgcttcaagaccaccttgtacacgttctgggttaaatggggctgcgcgagatgggataaacataactttcataattaagccttattaaaattaaaatgaagctcccgaaggagcttaggacatccattctttacgaagttctgaatcatcacccaacaacatttcaaagagttctttccaattttcaggaagtttaactacgtcgtacacagggttctgaatcatttcacgatactctgacttttcaagggagcctaatcccttgatgtatcgaatactatgcttaggcagtgtatctttaacttcttcatactcagctacagtataaaaccatttttgagttttgccaatttgtgcaataattacaggtgttttaacaaagcgaatacgtccttgttcaaacaattcaggccaattactaaagaaagcaagcaaagcaggataaatacttccaaggccgtcatgatcggcatcagtcataattgcaatattacgatagttcgtattctctgccttttcaccaagaataagacctgtgatagcacagatatcaaagagctctttgttcttcatcatatcagcatatgacataccccagctattcattaccttaccacgtaatgggaatccaccgtgtagttcacggtcacgaacatcaatgagataaccaattgccgaatcaccttctgttaaaaacaatgtcgtatctgcatctttaccacattggttagctttaatatgcttatgaaccttagctttagttgcctttttagctgctttagtttctgcagccttttctgccgccaatttacgagctaatgctgcttcaacaataggcataatcaaggcttcgtttttaagaagcgcctgagcaattttcttagcgtctaattggatatgattacgaatatcaccatacgttgacgttaaacgttctttagtctgagaatcaaaacgcatgttgctcatgtctctaataaacatcaacattgtgaggcattctttaacacgagctttagtgacttcaatacccttatatttctttttaatacccggcaaaagatgttcgcagatatcgtccattacacattcaacatgatgtccaccatttttagtatggatgttattcacataagttaaatgacggaagccatccggtgatgttgtgaatgctatagagactttatcattttcttgaatgatgttatcttcaccaaattgtttagcaaatcgtttaaaattaccatcaacctttttaccattaaatgtgaacttgatatcaggataaacgactgccaatgtttgaagtcggtctaaagtaatatctaaataaatttgagataaattatgctcttcaaatgaagagaaatcaggagtgaagattactttagtgcctttacctttagatttcttagaagaccatgatttgttttccattccgtttgaacagttaacagtgatttcattttcgccatctgacgtgatgcctgtaaacaacgtagagaagatattagttaaactactcccgacgccgttcataccaccagtcttgcgttcagagtcatcaccaaagttaccaccggcctttggaatagtccaggctgctacaggcccaggaatttgttcacctgtttggtcggtaactaaaccttgaggaataccacgtccgttatcttccaccgaaacttgattatttttaatttgcacatcaattttatttgcaaacttaaatgatgtacgaatagcttcatcaaccgagttgtcaataatctcatcgattaatttaaccagaccaggaacatattcaacttgttgatatttaccaaacaaaaaaacgctcgtgggcttctttagcagaagaaccaatatacataccactacgtttcttaataatggttctacatctgacaataccttaatttcatttttaatcatgttgtctcctcgttatgaaggtattctatcatccgaaatctaaagcaaaaagggccgaagcccttatttaaatttaattttctgaagtgcatcaattgcagccaaacgcccttgttcacttttaactgtaatgaccacatcgcctgatacgatcaccgaaccatcaacaaattctatagagccttttttgaaatcgatagctgtatctggttcctgaacttcttcaaagaatttaaattctgcaccataaagcagaatatcaccttgcatactatgaatagttcggccataatcgcctacggcttctacagcaataaccgaaacaccgtaaccaatcatctcttccacaataaaatctttggacaataaagtagtatgcagattagtattaagacgtttaccagtcgtattaagaattctcaagaaattatcttcttgacctttgataatacgatatttcttaccaacttcaaaacctttaaaagccataattaaccctttttaagtaagtcgtaaaaaccaccgttcacatgtttaggagcagaaacccgacgagtagacagacgatgacattcagggcaaacatcgttttctcgttcagaaatccttttaattttttcatattcatgaccacaatcttcagattgacatttatagtcgtataacggcattattattccttaaaatgtgctttcaacatttgatacaaagaccatgcctggtcgttattttcgatagtaatcgtcatcaccggaaattcggtcaattcatcaagttctccagagtcttgctcttcagacgcttgatatggatttccaacttcatcaaaaaactctgcttcactagtagagagccagataaagttttcatcaagaatatcaccaccagttgcgtatccaaccatgccagtagatgtcacaattttagtaggtcgtccaagatggtcaacatctaatactttaaatggttccatgccaagacgtcgtgcataaatcccattatcagtgtggtttttaataaactcttcttgggcacgtttatctttaaattggtaccatgagttaacgcggaatttattagccattagtaagtttccttccaataagttgtaccgttttcagtgatttcacggaagataccatagataggcatttcatcgccgagtttttcgtaaacgtaaaccacttcggtgtagcataaaaatccggtccagtttttctgtacaacaactaaatcaggattaaacagaacatcttcaaactcatcgatgtttgaatcagtagttacgtttttaatgatttgacgtttcataatattctcctcttgttttgataggtctatagtatcatagaccatagttgttgtacatcattttagcaaaataaaatcaacttgttctgccaatgaacgtctaaacattaattgacaacttccgaggatgaaatcaggtgcttcatagaccgcgatgtagtatcctttagctttcaagagttcaacatccacctggtcatcaaaccatgcataaaccgcgtcaacactttcaaatccaaaatagaacccttgagcccaatcttcactcaattcaaatgtgtgctcaattctatagtatcttaagatattttgttcaagaagtttgtcttcatttactgtaggacgattagggacattatagttgtcgccgtgatggtagaagttacctgagattattccatgtttatcaaggaattcccatgtttcttcagagttgtcagtgccagaccaaccgtaaggtgagcgaggttctttattccaagaggtttcccaaattctgacggctttaccgtcttcgatggcaattcctggtaatgattcacgttgagtacaaaaactacgttctacgcggtaaactaacatattattctcctctggttgatatggttataatatcaaaaccagaggagaagtaaacaactttatgcgaaagcagccgggctatattttttaatttggaattcaggaactaccatgaactgtccagcgaaaacgatgttataaagcttaacaccatcttctacccaacggtcgctaataaatccagcgatttgcttagttttccatggtgttccatcagttgccgcagcaatagtgaattcatggtctttttcaacagaaactgatctgcatagtccccatttgaacgatttttcttccggttcaatgaattggcttttaacataaccaatgttgccatcagcatcacgaactttaacttcattgcgaccaaaaaccggatcacttacataaagaacttcaaccaacttaccagcaactttagagcgagaagcatctgatacgtgtacataatcaccaatagagagatttgcaatattcataataattccttaagctttacgaggagacacataacaagtgatttcggattctttaacaactctgaagtcacctaagaatacgatattgtataacttttcaccatcttcaacccattggtcactaatgaagccgcacatagtatcagttttgcttggataaccgtattcatcgatgaagtcaaattctttatcagtctggaattcaacgcctttgcaaagggcccatttgaactgtacattatgctctgtggattcaactttttctcttgaagcaaaagcactactcacaggcgtttccaagaactttgcacgaacataagcaaatttggtttcctgtgtcccaaaactaggaataatacgaacttttacctcagaatcttcatctttaacgccttctttaagttgaatacttacaacttcgaccaattttcctgcggctttagaacgagatttgttagatacgcgaacgatttcaccaataataccaagattcataatttctctctctttgtttaaattgaattcattatactccatccatccttggatatacaacattaattaaggatattaaccacagcactacgtggaactacactaaaatcacctgcatgaacaacgttcagaagttcaacaccgtcttcaatccactggtcagttacccatccatttactggacctgcgaacgggcgtcgaattgaaacatatttacacagcaaatcagtaggctcaataggcttaatcagagtaccgtacatacaagcgatatccatatcaatacagatgtctttaacgggttctacttcttcaatcaacagttcaaagtctgtgcttggaagggcggtagtagaaattgtaccatatgaatttttaatttctaagaataaccaagggccttcagcttgtttgatgaagttaacaatagtgaaactattgccttgagtggcacctaaaatttcacaaaacttttcgtaagctcgcactgaagcactgtaccagttgatttgtttttcgtctttcaggatgtaagtagccgtagtattgatattcataatgtttttcctgtttggttaagatagaaagattatactccaaccatccttggttgtaaactgattttatcgctgttttacacttatcgggtcaggattctcagggacatcttcaaggccaagcgcataacgctgagcatattttaacatcaaaatatctttagcacaatcatgaatactatcatgggcaacgaatccttttagcgtacccatcggtaatggacacatacttaatcctcgtgtcaacgagtaagcttcgattgccgtacgaatatcgcgttgagcccagaatttaaccggttctaatttatcagtatcaatctctggttcaagaacaccttcatcacgatagagatcacgaatcaaatcgaccaagatcgggaagtcaaagctcataccacggcaccacatttgcgatttccattggtcaactttattagctcgacaataatctaaaaagattttaatgccttcaagcgtagtgacatcgtcttcagacggagccaggtttttacgtgcttctgctgattgttctttccaccatttcatagtggatttagcgaaaactcgcttccctttttgagaagctaaattaaatttaattcgcttacctcgttgaacaagttcttcaaatgattcaacaacttcagggtcggaattatatgcaataaccgccaggtcaataacagccgcttttgatgtattgccgaatgtttcaaaatctataataacatcagtgctcataattttctctcaaataaaatggacgtcaaaacgaccacgagttgtgccgacatacaatagctgtttagctaattctgaatcggcataatggatacacggtgtataaacaaaggccgtgtcaacagacataccctgagccttatggaaggttgatactggtagtgccttcaccttagtgaacatacgtttagcatcccagaattcactccatggagctttaccacctttattccagaatttgtatgtttctgctgtcttagccaaaaacaaattgaatttataaagctcttcttcagaagaaataacctttatatcctcgcggacgtattcttcatcatccccatatgtttctactgtaagattccaatatcgtatcatatactcgcctgaaacaccacgtgctttaacgaatgtagacgtttctacagcatctcgaatacgaacgaattgcccgttattgaaaagcatttcggtcatatttttgccatctagcttgtatgtcttagtaaacggctcttgtagaacaatgacttcatctttaataaatggcttttctgtttcaagaagttttcggcgaataattgaattcaacttgtcaaccgacttatttgtgaatgccatcattcgattttcgaaaaggtcttcaggagttttaacgacattaaaatagttcatcatatacgatttaaggtctgtatatccatgaacaccatgcccgtcaactactttatcataaatccatttgccattacgaatatcggtcgcaacatcaataattggtgcattgctacgtttaacttctgtaaggtcgcattgcacgaagtctttgtgagtgaagaaaggacttagatacgcagttgattcgcctgggtctacaggtcgaatctgacatcggtcaccaattccaattactgtacaccatttagggatactagctaacattattttaaacagagaacggtcgcacattgacgcttcatcaaataacagtacacgacacaaggctaagtctggaacctttttctgttcaaataatacgttttcttcgtatgtagttgggttgattttaagaatgctatgaatagtcgatgcttcttggcctgcaagtttgcttagaacctttttagcagcatgtgtaggggctgctaaaataatacctgattctccagaagaaataagggcttcaacgatgaatctagtaagggttgttttacctgtaccggcaggcccattaatagttacgtgatgtttcttttctttaatagcttccataacaacgttgaaggcgtttttctggccttcagtcaaatcatcaaatgtcatcgtaaagtccctgcaattggaatactaacaatacgacccgtgtccaggattcgttgatataatctttgcgtctccgcgtctagtttaacgtgtttcatttcaagcttattaaaccagaacttacgcggagtttcgaccattcttagaactcccatttttaaatctgttttatactgtgttttcaaagtatcgaaaactttatctgcaatatcctttctaaaaaatactgcaggacgatgctcatcaagtggaaccgggacagtaaatccttccatatctcgataaactattgcatatacataaaccataattaacctttaatcagttggaataatgatgcgctaagtggtaggccacgtttcaattttaatttaccaataaaaccaatcttttcgaagcgttgcagaccttggataactttatcatatgtatcgaaaagcgattcagcgtcagttaatttagttttagttttccagtcagagcctttaagaagaacgttgagtttagtaagttcatggccttctgcttgatgtgagccattaatgcgtgctttcaaagcaacaattctaagtttagattcgttagataaaggttgatttttcatcatgttcgccatatgcttaacacgattttcacgttttgctcggatttttaaaatagtaccataaacctttttgatttgggcccatttcttctcgtcgagattaagtttctctactttacgggcagaaggattagcgatacgtcttgcaatggcatcacgtttctcaataagttcttctaatgttaaatcagaacgagccgtgttatattttttcttaactgggataacattacctttaatgtagccgatatcgttattaaaacgttctaaggataatttctcaccttcaacagagttattgaaagattcacctgagtaagcgcagaccttttgatcaagaatgtttttaaggtaattaaagtctaagttaaaatccttagagcgtctcttcgcagaagctctggtgtggtcaagacgacgattgattttgttaattttattatttgataacataatattttcctctgtcttacggacgttaaggtcatttagctgataagtctataatatcatgccctcaggtagtgtacactctttttttcataaaatgctttaattttttatgtgttataatggttctgagttccatccggttattctaattcagtcagtaactgacaatagacagattccagattgtataacgtccatcttgaataatagaatctacacgcagtgtagtccctatagggagcataaattcgcattcgtcagatataagtctagcattagaccgtcttgttgcttcagggaaagctccattgaactcgcaagatggcgcagccagaatcatattaagcatatgttcacggaagttgaaagcaaatggtgcatctttgatgcagaacatattaaatgttccgtaaaaattatacgaagcaaagttacgtgctacaccgaacactgggctgaagctcattactctgtcaaatttaataatactaccaatgcctttatcatcaagtgtggccatagttttcttagagattccacgatacattgtctcaggaacagaagacgtccaatttctacgaacgattgaacttaactcctgttggatgctatctggcttgttttccatacactgccacagtacactttgttcaatgtcgctgaattgactatcaatttcgtactgcaatacatcttgatattcggggttttgagcatgacgaaccatttcttcaatttcacactcgttatacggcataaacatttaggtttctcctgtggttgataaaagtataatatcatcatcggaagagtttgtacactaaaaattcaacattttcaaatgaatgattttgtataaccgagataaagggtcatattctaagtcttcaatttccgcaatctcaaatctagagatacctgagaccatgtattcttgttcagattcaatcatatctaggacgtcaacacgcgtttcttccataacatgcttaggattctttccagcgagtataatgttaaccatgttttggtagtaatcaaaaatgaatggagcatttcgaagactaagaatagtgtacgtttgatattcccatctcccggagaattgacgagctgtactgaaatcagttgtgaatgatgtcacgcgtccaggagaccaatggcatccaacagaaagaagggaaagacgttctacttcttctggagttacaccacggtagagttctactggtactgtagaagtcatatgcttacggacaagatggtctaattcatagtggaaatctgggtcttccttagaatcagtgcaagcccagagaatgttttgttcttggcgagtgaatttgctatcaatcagatttgttaggtattcacgttcttgaagttcagattgacatgtcatgatagacctccatttaaagataagcctatcataacacgagaggagggaatgtaaactactttttaagctttcctactaaaggtccatcaggaccaggttgttctaacatgaataaggatgctttaaaaagcaatgtcaaccctttcaccattcgataccatgtctcaaagtctttttccttgatttctagtaagaatttctctttcaatttctctttcatttccaaggactccatggtggtgggtcgtcataataagaggcaaggtctttcagggcttcgacaggtaaactaaagccgtgtcgttgtataatactatctagttcatcaacaagttcactacgatgcactttaggagccttgacttcaggctcatcaaacatactcatcaagtccatattattcaccgagataaaaactagcaggttcagagaacgtttctagtgctacaccttttgtcttaaaaaatttccaaatagctcgttgcaaatggattaaatctgctaatgatgtaataaagtatttttttggcaaaatacttatggtctcgcttttcaaacaggtctaaacgcttttcaggattcacataaacagcattttctgtagattcgtaccctaaatcctttatgccttcttcaagactaaacggagaatttttagaatgagtaatagctccaactcgctctacacgaattttgtaacctttaggaatctgcaatttgcagaattcttctacgatatattgcggattatttagacttttgttaatgagaatagctatttctagtggagtcttatcttctactggtatatgtttaaatgacttggcttcaagcaaatacattttaaataacatagcatccattataatttcctcgatggttcacccatataaagttttacaatacgttcgccttcatcttcgacgagcttttcttcatgtttctggaattctttagccatattctcttcaagaacatccagccaatcttctggaccgacaccatcgtcccagcttttaaaccatttaactaacttgttcattcgcagctccctgagcttgaaccacaatcagaataacttgacccggaatcaccaggccaagacgatacgtatgaatgattataacttgaagagcttgaagcagacttaggacgaataacttcttccatcatgccgtcaccaatgtattcccaacttttttcgtgtgtatcaggaataggcatcataccttcgcctggtttaacagcaaataacttcttcagtatcgtaagcattaattgttcctcgaacaaaacgaacaccaccatcatcccaacggatttcggcattaaatttgacgtcttcaccatccatcatgaatgagtgtacgactacgtcatcataatatccaagtccgtatttcaacgaaacttcttgtgcaatcaaagcgcctaatgtgttattaggtttaatccaacgatttaacataatgttctcctcttgagtaagtaagaatatcttaacatagtttttagtggatgtaaactctagaaacgaaaaaaggaatccagaaggattccttaaattatttaaccacttactggtgtgggggtaaacattgcagcgttcttagtacgccaatctgctgcgtcagtcaccacagtagtgtaagcagctttttcagacgggaaagtctgataatgagaatctgcaatccgatgttcgtttgaataaatctcaaacggaacagaaacttccatacctttaacttctttgccttcaccagcaggatgcgtaaaggttttgatgtttacataaccacccataattaactcctttgttgtttaattacaggtgtatttataatgaattcctgtggaacagtaaaatatccgaatttagctaatataacaacaccaccgttaattattaccggagaataatcatctggagtattaaatttccagtggagtctagtattatatccatcagagccgaatgctttattagccggtctcccggcttttgccatgcataaaaatcaagtttcatttgcaacccaatcaaccatatgtagatggtctgataattgactaacatgctgaagctgattagacaggagtttacaaataagctcactgttatcatttttaaatagttggtcaatacgtttcttatgagctttcttaagctgacgtttatttaaacgagccattaataacctcggtcttgacgagcaaagttttcagcattcttcagataatacagtttaaagatttcttcagcagaaagacccagaccttggaacatgttcagaacgaagtgcagaatatcaatcatttcgaatttaatttcgagctggtcttcaggagacagttcatcaatacgacgattacgatattcagcatgttgtgctttccatggcttccatacagagctagcggctttttcaccattgctcataccaccaagtgaagtcagcagttcacggaattcatcatcaatataatctttctgattacgcagccaatcaacaacatcaccagcagtggccaattcatcaggatgtttgttatgttcaggcttgtcattagccagacgaacctgtaaagatttctgcatatcaagcattacctgcagtgggtctttatcttcgtgaatcagagcattaaaataagcttcttctgctttatcaacaccagaaataagttgtgaacattcgttaaagtgtgccattatttttcctttcaattcagtataagaaagttaattctaacattaattttataaagcgtaataaataataggtaactaaggagatattatgtttaaacttccatcgttaatcaacgctattaaaggcaataaaaagaaaactgctatcgctgcaatagttgtaggtggcattatttcatggaacttcgggattgcaccattgttagttgcccatggtattatagttccttctgttccattggatactgtagttgatttggcctttgctattatagggcttgtttaaatcttcgaataacgagataatctcattttagcatgcaacccacttgaaatattctgtttcatatattctaaaatttcttgtggtgttgcattttctttcattaccatatcattcacatcctttgatctccatggagctcggtcccagaacatgacacgttcgcctgcatcaactaatcgcttcatgcgagctatagtatctggatgcctaggttcattatccattacccatacccgacgttctttaaatggtaccacatctaaatctattgagccgcctgtaatagcgattgcattgggtatgaataaactatcaatagggccttccattacccagacgtctccttccttaacacgttcaacaccataaatttttgttgcagactcaaacgctttaatagtgatatatttctgaggagcatctttacgaagtgcacgtccttggaatgactcggccttcccgtctttattaaaaataggaatcactaaacgtggctcgggaatctctttcttatacgtaccaggttgaatcttgttgaccaatttaggccattctaatgtgaaccataatctattccacgattctttaggaatacaccgagacttaacatatttcacaataggatgctcttcaggcagcttgtccagacgagaacaagacggcaaagaatttatagtctttttctccggttctggtttatgttcaggaaccttttcaatctttggttccattctagctttttctttacgaacttccattagatattcacgataaagctcttcgtcatactcttttaagtatccggaaatcgtattatgatattggcagttatagcaatgcacattacctggagtaccaccgtaataccatccgcgggctttcattgcatctgtctgagagtcgccacaaactggacaacgaaacgttaatttaaatgtgcttgaattattgatttgtctaaaacgagggaggtgagaaaacgcacgataagcaaattcattatctatccattcagccatagtattctccagaggccttaaattaataaggccatcttatcacaacttattaatatttactttaattcgctttcttttcttggaaggaatttgttctggacctttatttacaattgcacctgtagtagttcctgatgcaatagcttgaggactgccacctgaatcaccagcaaccatatcctcaaataaagggagttctttaaatatttctttctgctgttcttctgtaatgttatagcgggatgctacagcactccaggcagacatcattgaggccattccattaagacctggaacagtgctcatcattcgcttcattgaacgaactgaagcatgaaaaggtgtataagccgctttctcttcgggagtagaaggacgtttaagaacacttccacgttcgtcgatgattttggcttcgtacgctttccattcggtaaaaggtttttgcattagtcgaataaacttatatgcataaactgaatctattgcagtgttaataatacccataggtacctcctgagtatatttaatcaatcacaaagatcgctttatcaccgttcgcatctgtgacttcatatgtagtgtcttcatagtgtggaatattccaaattacgccatcattagcttttacgctaatatggcattggtgttttgaaacaacttcataatcttcaaaacttgtaaaaacactaattttagaaccagtgcaaattgcagtagtcattttaacctcgattcataaatgcattaaatatttggtcatcaacagaaatttctaattcgacttcaattgtttcagccttttcttcaggtggtaattcgtatccacacactacaatttttttcatcgatatcaaaatatacagaagcaatacgattaatgttactttcagttaagtctaaatcaacatcaacatctttttgacctacacttaaaggataactaatacgagttattttattatctttaacaaagagtccaccaacatactctgtactacgtttgaagtttacacgtttccgaattgaaagatatgatacatctttaccgtgagctcggctcataggacataatgaataactagaataagagatgtcaaatcctacgccttcaacatgtgctagagtatcatgagtaaaccaattatagtcgtatgctaaatccattaaattataatatgtgaaaggcactggattaacatcatatgttgtacctttaaaatctgcccaggcaacgatttcgttatctttaacaattacaaaaattataccaatatggtatccgttattattttcattcggtgttatattataacattgtgcattaggaaatttaccatatttaaatggcgcgtttttgtgcatataataaatcatattattcacctgtgatttcggttacgatatctttgttatcgaaattagggtcacaatacaaaacatagttgtactgcatgataccgccagacttaagttgttcaacaactttattaaccatattaggacggtctcgtttagtgatgttcatgatatcagagaagatttgttgttcaacatcttcttgatttgcagtcattgaccactcacagaggtctttatcataacctgccgtaactggagctggtgcacatgatactgcaagtaagattgctgccaatgataactttttcattttaactccttagttgatttgataggactattatactatagtccatctataatgtaaacaagtttattctttttcgcgaataataattacttgttgagtctgctgagcagatttcttttcggcaacgatagaccaaattaaagttccaatccaaccaaccatcgtccagttaaagagcaaagatacaaagaagatcgctgttgtgctttttgtgccacgaataagtgcgattacccaaggcaacatgtaaatgatgattgaaccaatacctgcgattaaaactgctactgaactggctacgaataattccatgttaatttcctcttgatttgttatgtttatagtatcttggtttaactttggtgtaaaccaattaattaaatttgtttaaacgttcaatacactggacgtagttattcgcgatttgtttctgggtaggctctttaccagttgtttcaacatagcgaataaatgcgatttcagtagcctgtagacaatgttctttaacgcgttgttcttttgacatagctacagtatcagagtcacgataacgttgagcatgagcatcagcttgaatcattcgattacctacagtaaccgggtcttccacttcaactttaggttggttgtactgtttaacattcggattgtaaatcagttggccaacgttattagggataaagccatgagcaccacatccggttaatccaaataccattgctaaagcgattaattttttcatttcaatttcctctatagttgataggtctatagtatcactaccatagacccctgtaaacaattattttattttattcctcgtcttcatgctcgtaagcatgttcttcagattcacggtcgcagtctaaacaagtcgcattatcatatgcatcgaaaacagcttcgtcttcatagacgctacaaccacacactacacattctacttcttccattttagatttcctctttacgccaatcggattcaaaaactttcttatcatcaacaaatgcttcaactaaagctttatttacttcagcaaattgagaagtggcccgtaggatttggtctttatcagacacgtccatggtaacttctttggtaaacatattcccattttcaaaccaaccaataaacaacactttagccatattttccattttagatttccttcacagaaggcccattcagcgtgataaactgtagcacctttagtatcattcatttgaactacgtctaccggagaaattactcgatagagacgtggttcacctccataagagcgtgctgctcgtcctgcataaatctttgctaaaccgatatcttcagtaaagaatacacgatccaagtttttcttacgtccagtttcagacagaactcctgtttcttcaggaggacaaagcatgttttcgatgttagctgaactacttgaaccgtgataaaaaatcttaaattctgctttacaatcgatggttttcattttgttctccagtagttgataggtctataataacacaactactggagaagtaaacttaaaaacgtaatttagatatatctgcgttgatttcgttttggtttgcgtcgtatgcaattaaacgaaccgctttagatgggtcattcaatgcatagaaatgatggaacattgctcgaacgatatcaccatttacgagttctacctggataggagaacctttttcgagttggaaatgttcataagctttgatggttcgcagataatcaagtttttgatttccggctccgacaatttgtacgatacgtttgcccatgttttccatacgagatacaatagttttaggggcaagaataacgtaggttgccagtggagaaactacttcaacagttgtgttttctgtgattgcagtaaaaattgcttgagacatattcataatgttttcctcttggttggtgtaagttcatcatatcatgcctagaggaagatgtaaaccccgaaaggagaccgaagtctcctttttattaaaattttaactcattggctaagctatctaggtcagcacgtgttgctttggctttacctacgcgttccgtacgattcacctctgcctgacgcatctgagcacctgcgttttcatttactgtgttaggtgtgttcatgccttcttgctcaatctcaacccatttctgattgcctttacgtacacccatcaagaacttgttccacttattcttatcaccgtatcgtgatttgatttgtttgataagttgttgttcagcttgtgcaagttcttcggtttcaattacggccaacatgaaatctgccgttgctggtaaacctgctgattctgcgatatcactcatgttcatgtctgaagcatcccatgctgcacgtcctacttgagctgcagtccatagaactgtttcagattctactgctaatgcacgaagttcttctgcgatagctttaactaatgtgtagctattttcagtgtaaactctgatacgacaagacccacaaatacctaagtaatcaaccatgattacagatggcacaaagttcttcttaagttttaactcattaagcaatgcacgaaatgtattagcattagctccaccagtaggatactgtttaactactaaacgtcctaatgtggattttgaacgccatttttccatcttggctttatattcagcataagatacgttaccgtcatcaatatcatcaagtgatacgtcaagcatgtttgcatctatacgcttagcgcaaacttcttcagccatttccattgaaatataaagaacattatggcctgtttgaagataatctgcagcaagtgaacaaaggcctaaagatttaccaacgttaacaccagccattaaaacattcagtgtaccggtttcagcaccacctttagtgattttatttagaatgtttaatttgaacgggaccttacgtgctttatttagataagaaagccagcgtgcttcgtagtcttccatccagtcatgaccaacataactatcaaacgaaattgaaagtgcttgacgcataatatcaggaatagctcctacgtcaggcattttcttgttacgttgttctggaggtagttcagcattagactgaatctcaatgattttggatgtagcattatacatcgctttttgctggacatatttctcagtttctttaaccaaccattcatggtcttcaggagtatcagccaatttttcaattaggtctgaagttcctttatattcagcttcagttaaagaactgttatctaaagccacctttaatgcattgatagatggcattgcattatattcgttaacgtggctctttataattttaaagacgttttttgccggtccacgctcaaaatactcagaatccatataaggccagaccttagaaaaataagcctggtcatatactagatgagacaaaataatttctaccacgataactccttaaaagaatttaaattttttcttggtccgttcattaaaagcttgttgtatttgcattgtaacacatttttcaacatgtggtgcaagttctgcttttctgtcctggtcaagaactgcaaagtccattacgattttaccatcaacccagtctagttttgtaatatagactatatgatgagaaccatcttcaagtgtaatcagaatctcttgaatgacattttccattgctgaacggataattttaagagattcattaaacactcgttctttgcgaatgtcttccccttccgaagaaggggattcatcaacgatttctagatttaaatcatcgagattattcatcgaaatcttccatttcgtcaaggtcgttttcaatatcggctgcagacggagcatcagaagctttaaccggaactttagttgttgctttgcaattaataaggtcgttaacagcgtcatcaacttctttaatagaagagatagcacctagtttatatttagtttcaattgcatctcggaaaggtttgtgtttaaacaacggtccccagaattctacacaatcagtagctttagcacgccacgatttctcttcacgaatcatttcacctgtttcttcgtcaaggaattcgcgagcataccaaccagctttaggcttaacaacaaaaccaatttcagttgccatttctagcaagccgctgaatgggtcaataccaccatcgaaattaaccgtgattgggaaagtagatttttctttaacggtgcgagatttttctgctttcaacgtgaagtcataaccggtcaattctgtaccttctttaacctgacgtttagaaataaagaatacagtgttagcagaataaagaatacccgtaccaccacccataatctctttaggatacaatccgccgatttccattgctgtatggttaattgcaacacacggaatatctttaatagtcagatacggagtcacaatgcggaacagagatttaagtgccttagcacgagacatatcacctacgactttctcgttcaatgcatcttctgtttctttcttagatgcagtattacctattgaatcgataaagataataactttatcaccgcgttcaatagcgtcaagctgattagtcatatcgactttaagttgttcgactgactgaattggtgtatgaactacacggtctaaatcgacacccatcgaacggaagtaagattctgaagcaccgaattctgagtcataaaataaacagattgcatctttatatttcttcatatacgctgcaaccatagttagtccaaacaatgttttaaaatgtttagaaggtgcagcaaaaatagtcaagcctgattgcaatcctgcattcagagcaccacctagtgcaatattcaacatcggaatacgagtagggacttcatcacgattattaaacagcttagacttagtcaagtctgcagtcattttagaagtagaagctttaatcagacgagattttaaatcagacattgtatttttccataggcatcattatattttactcatgtttaaaagataagatgattatatactaagggttatacagcatttaaaaatttaaatggctcttaacgagcccatttaatgatttctgtaatcaaataattacgttcgcttgcattaaatcctataactttgttagcaccatcatgattaagtaattgatacgtttggattttgttatgaattgcaaactcttcaaaatatgaaatgactgtattaaaaccgaatgaagacaaagtaataaggtcgtcttcaaaactttcagtcatttcgttacgtgttaaaataattgtgaacacatcatggttttggcaaagacgaacataatcctgttcataaacatcaagaaccgagtccgcatcttgtcgaatacgtccataaacccagttactaatatatccacggtctaacagataaatcttagtagggtctaaataattcaacatcgtttcgaaacaaccaacttcatttcgagacttaacatcgaaacgcccatcaactgttcgtttagggaaatcaatctttacatatctttcactaatttccattatgtcattaatgaaagttgttttaccggcattatccgggccatctactaaaataattttagccattttattcctcgattacgacatcttcgtatttaggtatattatacggcgaagaaattaaagcattaaagtagatgaactcaccaagacctggatggaatacttcttcaggattttcgaaatattgaatcttcggacgtcctttaagaatttgatagtactcagttttagttggattaaaaattcgaatcagcgcttcttcaggatacttatttctgtcgaagctattatttggatcggttatataaagcggttgacctaattgaattgcgcattcaaccacttgttcaaaacgataacacgggtcactaattcgaaatggatgaaaaataccatctagatgaataggagccaaatcacctacaagacgctgcatgacggaaggacgtataactttctgcgttacgataatcttattaccatcggcacctgcgttaaccagcacttccttttgacgttcattcaacacagtagtttgaagtgaacgattaacagacaacatgtcggtttttaagaattcatcaatataaaaacgtggtttattagggtctgcagtgatattgaaattgaattctacgtcaaaagcgccatcatatccagtgatatctgtgattagaaaatcacaatcataataagcaattaatgaatcaaccacaaattcattttcagaccagaaatatttacgagtgttatacgcgttatctttataccataatggaacaaacttaaattctgggaaaagacgttcacattctttaatatcagatgcattacgtggatatgtaatcacatcacccggattagcacggtgcaaatgaagttggaagttgccatccttaaggatagcatactgtccagtttcataagaccgcatactcaagataggtacgcggaaaatagccattagtcaaggaatcctttaacataatcaaaatcacgttcaaacacatgggcacttaccatggtatgagtataatcaccaacttctacaccgcattcgttagcgatataatgaagtaattttccttggagataaaaatccaactgcataacaacagcacagttctgagaacgcatatgacagtgggtataaagcttaccatcacgaatataataagtcactgagtcagtacatggatattcaagcgtttcgtccgaatcaagcaaagcctgatcagaactttctagaatttggaacacaactcttcgagagttaggcttctctttaagttcttttagaagagctggtaattgggccgcaatgcgaggaccatagaaagtgttgaagttcgccggcaaaacatctgattttggtttagaaataaatttagcgacattaggatatgccttaaacgcttcttctgcatcagtaccaccagaaatcataaacttccagaagtcttcagcatattcataagagatgcggttaatacgtggatcggtcattttgaatgatgatggagtgtcaacaactactgccatagacccaatttcattacaacgtccaatacgagaatcagttacgaattccgggttttctaaaatttcacgattgactgctttaaatgcggattgaaaatctgcggctttgatatatttcattgtgttatgttttcccatgtttacctcaatacaatttattatatactcgattcgtaaagcttatttgaatttcttggcaatgttggtataccgtaaagcttcagcatcgatacttccaagaacactatgaagaaatgcatcagcataatattccaattgaacaggttctttaatcactttagccgctttggtttcaaacaggcccataagggcctttttaagaatttgttcgttagtgttcagtttaatagtcaaaatctcttcattaagttggtgattaaaagtttttctagaaatcattccgggtacctcagagcgtcatcagagttagttatatcaataatagatatagagttttctgctaacccgtttttagataattgacgtttataatatctttcacaatatgtacacgttgatccacagatttcattagcacaatcaaaatctggatgtctgaaccaccttttttctaaaaagccatccaacaaagaggtttcaatatttactgtatgtgaaaactcagtttcgttttcaagagtgaaaatagtctctaaaggcttccacagttctaacaaattaccttcaaacttttcagaagcgtatgcttcaagaactttcaaaatgtagtctgtgctacctgtacgtcctgaaactttgaattgagtgataccaatatcattataaagtttcaaatcttgaggacgaacaaaacgagttctcaaccagttaaatgggtctgtatcacgagctttaatgcagtgttgcattggatatccatttaaggatttagcatcatcagctgtaacatcagtactatggaaaatatagcaagagtcacgatagctacaatgtgttgtataccctttaccagcattagaacagaactcatttacaagaacttcaaatattatattgttcttattgcaaaactctgctgcacgcttcaggaaagaaactgaacggttcttatgaattccacagcagacctttttgatattatattggtcatgcaagtattttatttgagttacagcatcgacatgtagaattgttgaaacttcaatctcaatgtctttattgacttcacgaacaatttccataacaacagggttagcgatagtaatacgccatacgcctattgaccaaagatactgaacataatcctgaatagctttcttcttccactcgactagttctctttttgaaccaggatttatcgtgttgagtgtatagttaaagcaaatacctaattcgttacaacgtttaacgtaatcttctaacatctttttgtcaacgtcaggaagcctaaaatcaggtctggctgctacaaaagccatttctcttgtagagccgtatacttcgtttatcaagctattaggataagttttattgagctctacgattttatcaagaagagctaaatcaaaattcgttccgattttaaaagtattcattttttgcatctcgcgttaatttatgcgatggtttttgcaggtcttacttaaattattataggttcggtttatatgatttaaatgtttcgaattcgcctttattcataagagctttgaattcgtcaggacgcatagctttgtcgtcgataatccaatcatatactggtttatgtgttagcaaattatggtacttcaagccaatgtttgccaagttctgaatcagacttgggagaatgtcaattgctatacgtccaggacctactgacttcataccgcgagcagtgtaaagcgttatggtatgccctgcatcatacagggcattaatggcagacaccatttcgacgtctggcttgaagttcacgtaatcacgattgttattccactctgttatacaatcgtcgacatcaaaacaaagattaagcatgttttctacacgatgcattagattcgttcccattgatgagtgatatcgccaccgattggacgataggaaacaccagtttctttatcagttagtacccatttaccaggattttttgtaatcagagtagccgttacaggttctgctacgtcataactaatagagccatcttgaagtacacggcccatgttacgtaattgcttagtcagaagttccatacctttataatatgcggctacagctttaagtggattattcttgaaataaccacctaatgcaatccagataattgccaccgccaaatgatgatactcgttaaacgaactcatctttccatatttgtaaattaatggattgatgttaatagtcacattacaagttgtttcatcaatagtaaactgtccccaggtcggattagcattgaattcatcataacctgaaacagcataaagcactttagcttcatcatacaattttggcccgtaaatcttggtttcgccaaaatatccacgagggtcgataaacttgacttcgccgttatcagtaatcatagtattactgaagttcgggtcaccatgaataacagagtactgtccctgagaacgattatgataacgaataaggtgttctaaagcttgtttcagcattggcttcagacgtccaatcttagtgtagttcacatgtgtgattttaccaaatgaatcaatcaatggttgaatgctttcacaacgatcaataactttcgtatagaattctttagtgaaatcacgacgaacagtttcaggacttacaaaatacgtgtctgtgctgaatttcagtgcatctaaaattgcatcaacaatttgtggacgagcaagacttgatttggatttaatatattcaaatgccggcttacctttaatacgttccatttcaaagttattttcattaacagaaactaactgagggactgaatctgatttcactttcaaataccatgaaatctcatctttctgaagagctcgaccctgttcggttaatgcgaatttagttacagtttcttcaccaatttcaactgcattaaaactacgattaagttcacgaacttcatgagctttttcaagtttaggcatatcacctaaatcaattatattcataagctctgatttattgaatgcgccgctgtaaaggaattctacgaaatcacgtcctttgcagtattcatgaatttcctcatcagtagaacccatgtagaattcccagtctttgaactgataaattcctacaacattaccgcctgttgaacctacgttagtgatattttcaccgtcgaaattataccgacattcgtcacccttaacatagattgcgttgacattccaagaccgtgaaccaaaatcaggaataatatcacaccagttaacaattacgttatggccgtctaaatctttgtgtaatttagcaagagcataagcagaaccgtacgcttcatcaactgtacgaatagtcacattgaacccttcttgctcacaataagctcgaacagtttcagcaaattttgaatgaactactacaataatttcatctgcgccaaggtcagaataaattgtatacaaattgctcagaatagtgtcttgtttatagttaacaagcaccttaggaatatgatgcgttattggatacaaacgagttgccagtccagcaccaagaataacagcttttttcatgttgaagtcctcattggtaagtaggagtattgtacactattctagttaaagcattcatactttgcttgtagtccaatcataatccatccaattacaagtgttggaatcattactggagccgttaagctccagtagatagtcatgacaagcatcaatagtaaaagtcctattgttattgctttcattgttcgcctcgtaacatggcacctagtgcaccaccagggtggaacttaaggaaatcattagaggtaaatccacgttcagacgaaaggttgatagcaaacgtatcgataagcgctaacaacaatgtagtggacatagtcggagccagagaattctcatcaacttctaccgcgataccggtacagaacgtataatcaaaaagagcttcgtattcttgtggaatgtcagggttacaatgtaacagaatctgtttaacctgaggacgaatcatacgaagatgtttagcaacacctatcatttcttcagtcttaccagaacgactgatgtgaactaatacatcattaggtgcaataaatcctgcgtcaccgtgagaataatgcccagtgttcaagtacatactcgggataccgagtgaagcaaatgtctcagaagctttagttgcaatattagcattcttaccaacacctgtaataattactcggctttcataattactaagtcccgggcgtcgaagagtttctagaatagcattataacgagcagggttttgactaattactttggccatagtggcaagagatgaagcttgttttacgattgcgtcaatagcgatagtgattggtgtagttttcatatttctctcatttaattagttggccgtccttggcattatatcaaaaatcgaacatatcgaacagagatgctttcttctcgtaatcgagtttcgctgctgatgtgaatccttcaagtggtttaataaatgtcttctcaaggagaacagtgtagtccatccaatgaagtacgtcgtctttaattaaatctgttatttcagtgccagaaggccatgcgatacatttatcaccgaatgggtttccttcacgtaaaggcagaacatatactttttcaccttctacaacttgtggtgcatcgatattacctttgatagcccggttatacgtcagaattccacgaatatggaacgggcatttgggaccagggaatccaccaacatcatatttagcaatgttattcgcagaagataccgacgcgatgctaatataattcaattgacggaattctttttcaaactctttaaaatattcttgtaatgattcttcaccttcctgaagcatacgacgaatacattccttaagagctttctgtactgctttaggagtcgaagatttctgagtctctagacccatgattttgagtttaggctcagcgtaacgagtaccttccatatcccacacgtttaatgcataacgtttcttacctgtccaaaatccgccaatacctttagaaccaagcggaggcccagcgatagcttctcggtccatgaacatcaaatgttgcttattattcatgtattcacacatttcacggaaacctctatcaatagcaggttccatacgttcacgagcgaacttatctaagaagtctacccaatggttagtatcgcggaatttagattcaccaaccttatcaataattttatctgcagatacgtaaatggagtctgtatcaccatatagaacgaaagcttcaccttctgtaccacaaacttcattcagatattcattgactttacgttcaatccactgtaaagccatttgaccaaatgttgtgattgcagttgcattacgcaaatcgtaataacggaaccaaacgtttccaagtgcaccataaagtgagttgataagcaatttacggttaatctgtgcagtcatacctgcaacttcagtacgttgagctctaaacaacatttcattaagagatttagcagacaactttttaatcttttctttaatctcgtcagtgaagtcaaaacgataatcaacatctaatggttcatcaacagaaagattaggattatgcaacgcctctttaattatttcaccattacgttgagccgcaagcatataacctttatgttctttacgttgattaaagactttagtgatttcagttggaactacgccatcacggtctttataatacatcatgccgttaggagaacaactgtacacatcagaaggacgttcagcaacagcgttaatataatcatgcaatggagctactttaaacgttcctgctattgtttctgggctaatattcacttggcgaataatacttggatacagagatgtaaggtcgaaactcattacatatttgtatcgatttggaataggttccttaacaaaagcacctgggtaaggttgaaccggatgcgaacgaccttgtggaatcaccttgttttgttctttaaggctattaaaaataatagcgtcccaagttttaattggactgaacacggattgaatctgaattttagcataatagcccatgtccaagctcaagttgatgaactggcgtttagcatcaatttgcaatacacgatatacgtcgatgatgttatagcttatatatcgttgatgattactttcgcgaagtttagaaataggaccgtcatatttcaatttaccaacgttcaattcaaattctgaaatgtaatccagagaatacgacggttgattggtaaaagagaattttttgtaaaggtcaatataatcaagaacagagataccgaacaatgtaatgatttcacgagaaccatacatgttttcgataactttaacacgagttttacgatgtggtgataaacgtttcgcagtagattcgccaaaaatattcttgattcggttatacacatatggaatatcaaatgactcaacgttccatccagtcaaaatgacaggagttttctgttgccagaagttgagatattccatcaacaattctttttcgttatcaaacggcatataaatgattttatcgataatttcggatggaacttcatcaccaccttgttcttgaagcttagccgcaatttcgatagaccattcttccacattaccgtatggagaattcaaaaggtcaaatacataaaacctgtcatcaattgagtcataatgggtgatagcatcaattggatgttttgcttgtgacggctcagggaacccgtccggagatgttacttcgatgtcgaagttagccacacgaatttttgtatggtcgtatttgatttcatagttataagtgtcagacaaatacgccaatttgaaatcgtccatgccaagtgcttcaagtccgatatcttccatgcgtttaatccattgggaggcatcacgcatattagcgaacaacttacgagtacacggcttaccgtagatatcgaaatatttcgtagcctgactttctggacaatgagcaaacagtgatggtttatattctacttcacgagtacgttcacggccattagaatcgatgtaacgttcaaaaattgaatcaccaatctgttcaaccgttaagtaaaattctttcatttaatttcctttagacgagttattgtcttttgtttgttgatgaacttattatactccaaatgggaccgaagtcccattgctttaattaccaattgtatattttgctttcaaagtccagtcatctttctgtttaaaagagataacacggaagttattagtcaggctaaatagatcttcacgagcagagtcttcaataacaattaacccccaatcttcaagcaactgggcaatcgaatcacgtcgctgatagtcttcaccgtcgatatcaacctgacgtccatccatacgcagcatttctttaaagtggacgatgtaatatttaccttgcttttggaggatatgacaagactggtaaaggactttatccttgttattagcgatgcccatacgggtcaaagtctctttgactttcagaaaatcttcagggttcttcaatttaatttcaatcatttttaccattccaatgctaattttttaaattgtttttgttctttcacgtttttggtaacttctttgagaaattcatcagtgaccatggccttcagttctttaaggactattggcaacttgttatttttttcaaggagccgcttatactcggtagcatcgttcatgttgattgtgtaatgtttcatcaacagtttgataactagtaactctgaagtgtcttctactagtttagcccatttagagaatcgacgaccacgcggaattgccgccatcatatagttgaagtgtgcttcatcacttaattcagaaccgactaagttcatcatgtaaacagctggcatacattctgggaactgggataatgagttctcaaccataaattttgagtagtcgacctgagcaattgacatcgatttcttttcattaatagcattaatgattttaaagaattcattctcaggtttttctttaaacatatcagcacatttttgaatcgcatcagcgtcattagacttccatgcaatttggtgctcgttaagctggacgtcatcatcaaataagttcatattatttccaagtcagttcacaggtcagttgaagaagcatatacataacatgtaattcaatattacttgctaatccgtgaaacttattattttcgcctgcaatttcataaagcgaaataatacttttaccaggtgcaacttggtcataacattctgaaactaatttatcgatgaaccatgaataatctgcggcatattttggagctaatgcacgaagctgttttatatctttgttcttcattgcttcgataacatcagagactgtgccacggtcattagttacgatagacaaaataccagcatcaagaacacctttagacgagtactggtctaattgaccaattgtacgacgaaagtccgggaagttctttttaaccagagctgcaacaactttcatatcagcgatttcgatattttcgttcttacagatttcaaccatacgatgaatcattttcttcatcatcgagattttatcttcttcggttggacgtccgaattcgataactcgacaacgactacgtaatggttcaataattccatcgatgttgttagcagtaataacaatagagcagttactagagaattcttccataaacgtacgaaggtgacgttgtgattcggcgagaccactacggtcgaattcatcaataacaataactttaggcttgccttccattgagactgaacgagcgaatgcagttaacggaccacgcacaaaatcaatcttacaatcagagccgttgacgaacatcatttcggcattgatatcattacataatgcttttgctacggttgttttacctgtaccaggagaaggagagtgcaaaataatatgaggaagttttcctttagatactaaagacttgaatgtttcatggtcatacgcaggcagaatacattcgtcaatggaagaaggacgatatttctgttctagaatgtgttctttggaattgatagtaatcatgtaattttcctcattatcattaaactggaggatttctcctccataatcgtatcacaataaacgtaaagctttgacttagaagtcgtgagtagaatcggcttccatcgcaataacataacttacttgagagctttcaaacttggctgcaactttatcaccagctccccacaacattactttatagttacctggctggattttcatattagccatattgattacgaagttaaagttgttagaaccatcataatcggtaagagtcaaagaatacttaggacgagttagtccagaatcttcaactttattatagccattgataacaattttaccatctttatttgtaatagcaattgtatcaatctgaagaccacgtgaaactcgaagcaattgttgaaggtcttcagctttaatttcagtaatcacagaagccactgggaattgaattggcttattaggaaaaacaatggtgctcttgtcagcggcaggccaataaaccgtggagcgtgtgtctgcaattttaatattgccatcagtgtgcattgaaatttcagcatcatcagacactagactcaaaatgcttaagaagctattcaaatcataaagtgctacgtcaaaatcaatttcatcagagatatttgcttccgcataagtggtgccattaactgcacgagtcataataaatttaccttgactcagcagaatgccggagttaatagaggcaaagtttttcagaatagcgatagtatctttagacagtttcattttatttcctttcaagacaattcaaagtttataacaaatttattatgcagcaaccatctgctttttaatagcttcaggcagtgattcaatatattctggaattttagaagcaacaatttcgccagctgcaattagttgttcgtcggcatcaacacagtagaaatcttccagacgctcagaaccgtctttatcaagaacgatttttccaccagcttcaatagaatctttatagtgcttacgcatcagatgaatccacatatcagatacatcgttatcaataaaaccataaatcataaaacgagtttcttgtggcaaagattggagttttttagcacttgcgtcatcacaatgcaggacccatgctttacgaacacgattatggttatgtgggttagcgtcagtacggatagaagtaactttcagatcagcagcagtgaaacctttagcagtagtaaacatattatttctctcttattcgtagaagtcggtaactgtccatgcggaattgcgattagacattattttattatactcatctttaaaagcagatttgagcatttgttcagtaacaatatgttcttcacctgaaaacgtattggtcaaaacatattttttaatttcagggacaacgagaagatgttgtccggttgaatactccatgttgttctccatttaatttgatgtggtcattataaccacatcgtgttaaagcgtttatgaaacagtcattacagtaaatcgtccaactttgctcatttgaagatgttgtccataacgttgagggtcatggtctcgatgagagataatgaacacattagtattttgtaaacttccaagaatagtatctatagccttaacagcctcagaatcaacagcaccatcaaaaacctcatcaagaatcagagtgttgattttaacaccagagaccttttcagcaatatctcgccatgtaaacaacaatgcgatatcgatacgtgccttttcaccttgactaaatgaagcatagctaaaatcttcacgaccacgtgattttatagattcattgaattcttcgtcaatagaaaacacgtaatcagcttccatgattttaagataatggttaatctgcttgttaaacagaggcacatattttttaatgatagcacctttaataccagaatcttttaacatatctgtgataataccacgatggtatttttcaagaacgatgtctgattttgttttaatgattttatcaagttctttttgaagcaaagctatctcatcggcatggtcgataaattctgctgaggcttgctctattgcagctttaactttcttagctttatcaatagtggcaatcattgcttgtttcttggtacgaatatcagatgcaaggtcctgtttagtcttaacattagctctatattcgtccactaggacactcagattatctctgtgacatgtaagttgctcgaatgagtgattacattcgtgaagcttatctgtaatcttagagacaataggatcaccctggtgcaactgtgatgcacaagtaggacatgtaccgccatcatgatacatcttaataactttgttatatgagtcaattttagatttaatcaagaatgcttcttgtcctatcttgttgaatgcctcagtagggtcttcatcaagaacgatattaagtagtcgctcattagcttcttcgatttcagcctttaatgaacgagcttctttggctaggtcgtcatacatattttgtagacgcgctacattatcaccagataatttcttttgacgttcgatattctcgttataaatcttaatttgttggataacaccatctttcttggcatcgagaacttgtcccttggaattaagttctcgaacttgagacttattgattttatccatttcagcgagtgtgccgacttctaaaaggtcttcgaccagttttctacgagcaggggtgctaagagccatgaaaggggtataccctgccgtcccaagcacaacgatttgtttaaaagacgcgtatgacattccgatgctacgttcaaattcttcttggaagtctcgactgctggcagattcatcaagacgaacaccgtcaacggagatttcgaaaatattgggcttttgtccacgtttaatgaagtattttttatcatcgaattccatccaaagctcaactaagagctctttcttgttcgtgctattaatgatttgtcctttcttaacatcacgaaatggtttaccgaaaagtccgaaagtaatggcttctaacatcgtagatttaccaccgccatttttaccagtgattaatgtcttttggactttatctaattggatatcaataggattcccacctactgacatgatgttttgataacgaacacgatttaatttaaatgatttcatatgtattctcttcgaatgaagtcctctacatattttaacatgtcatctctatcagcaaaatattcatctagttctgcatacataacaacacctggtgcgtactcacaggtaacatacatggttccaaagaaacgaggagttgattcctcgtaattctcagtccattcaactataccaatataaccgtcaccaatactaaattcatgacgatggatttcataatcagtcttcgtcattatacgcatcctcaatacacgcttcggccattttaagaatagagccaggagtatcgttgtccattatattaaagctaaattcaatagcccagtcagtgcagacatgaactgctttaacttcattgccttcaacgcgtaatggctcaatccaatacttgatagtgttctcgaatccatcatcatctttaacgtccatttcaacttcaagcctgagtccagcattgttaaattcatctaaagtcattgtgttgcctcaacataaagttcgttggaatatttgaccagcgcttctctgtcttcatctgagatatctggaatcgcgtcaatatattctttaataatatcttgaagtgatttaatctcgatttcctggtcatcatcagattcaacactgttatcaactttagaaaccatacgaagagagtgaactactttttcaagttcagattcaaacttagtcaactctgaatcaatttctgatactataacacgtacggctagattagtataatctgaataattgattttgcctttaaacggataagtgattcgtcgatgccatgttgtttcattaggaataaattccatacgttcaacgtcagtgtcaaatacccagaatcctcgagggtcgttctcatcacctgcagtaagggtccatggtgtcccaatatatttgacgttagcagcttcagagattgtgtggaagtggccagaacagacttgtttataggtctttaagaaatcaggttcaagcccatgagacttcattcctttatagaaataaaagccattcagttcccagtgcccaacacaatacgctgcggaagaagtcttgatgtgctctaagatttcacctgtattttcttcacacatccatggaacgatatcaatcagacatccatcaaaatctacagtagttggatgctcataaatagtaaagttttcaaattgagttaacaattcagaaacagtgttaggtgttattgtattcttaaacgccatgtcatggtttcctaccgtgacatgaacgtgaatgcctgctttagaaatcatatcaacgatttcacgattgaattccatcgtacgatgtgttattgctttacggacgtcaaaccaatcaccgcactgaatccaagttttaatcccgtgtttcttagagtattcaattgcttgacgaataccatcacgttgaatgtcttgaacccatgggtcgtcttgtttgactccgatatggaagtcgcctaagtacaaaattttcatattatttcctcattagttaattcattctatcatccgtttataaagcaaaaaaggaactccgaagagttcctatccacatagtacaccgtacagaggctcatttgaacttttaaatcgaatgggcttgtgcgtaatagttccttcggctttagctttatcataagactctttaaaacgtctcgttctttctgcttcgcctttacggattttatcgaaattttcagaagtcgggatgttcgtcatgcataagcacctctcagaaaatgcctaaatcaatttctctcatcgtttccaccatttcttaacttgaaatgaatcgacccacacgagttgttttgggtctgcctttacaataggcggacaaatttctgtaatagaaccgtcgtgatattccttttcagaaattttaacacaaagaggacctcccaatttaagggtgaaccctgcattcagcttcagacgtttaaactttgtttgaactagcgccattaataatgtcctcaatagcctgacgagtagtaacccactggattttaattaacttgtcattatatggttgtcgtagaatatcccgagatttcttaatagcatattcgtaagcttcgaagttgttttgaattgctgcttcttgagcgtgagcataaagacggtttagttcaaaacgattctttttaagaatcttttcggattttttacgtgcttcagcttcatttttcttttggatttcttgtagcattttagctactgcatcttctgcttctttattttcaataatctcggtagtcatattatctcattaaattaaaataaaaacgtccatcctcttcaatacagaactcatactcaaccggagtcccatttatcgaaaatgacacgtcatgtgggttcaaagggtcgatgtcaaaattaattttaaattcacgacccaacagttttaccaaataagggattgcttcgtcaaaaggttcttctaagtagttagagatgtcaattgtcatcctcatataaaaaatccaaactaggcgaatcgctaacaacttccttcttttcagccccaggagctttataagcggattcttcataatgcgtcattttatcgtagatgtcttgaataaacgtttcatctactaacgctaccatatcatcgtcatgactgtcgtagacattatgaacgaagtaactatatttctttgcaacttccttacgttcttttttgatacgttggacaaaagcattaaaacaagctcgagttatgtatgcatgtgggttattgtacttagtttcgtcgaaattatgaagtcccttaatagaggcttcaatcccatctgcaatcatctcctgcttccaagactgggtatatcctgaaaagttgaaacgtttggacaggccttcggcaataagcataattgctaaaccgatggtatcattctgacgaataattttgtttgggtctttattatttaagagctcctttttccactcgattatagcggcgagaagctctttattattcacatagttatttttaggtttttgttcagtcataagtacctcttggctcaattcataggtctattatatcataatatttagagacctatcttaaagcacgagatactatcggagcaaacaataagcctgaaacactttttccattaaacgtttgaactcatggatatcgatataaagctcagtaagaccggcattataaagaaaatctaaaaagttctcatgtgtttcgttatagtcgccttcatttaattgagatacatgagtttcccaaaaaccaacacctttaacgaatggaaaatacgtaactttcataaagttgtcgacgtaaaattcgcccagcttttcttcagttatagcgattcgagatagtttcattctagttcctttgctgcttcaagagcagcatccagcgaatcaaattggtcaacgaaatcaatattcaacgcatcgtcaaccgtagcatataaccaccattgtttgaattcatattccaaaataaatccaggaccttcaatctgaggaagacctaaactatttgtaccaacttcgtaaccagctagacgcaggtcattaatcaaagtttctgttaatacgctcattttaccgccttaacaattttcaagtcagcgaattttttcttacgttgatttttcatacgacggatagttttttcagagatttcatgtttctgataagctttagattcaacaccaaatgcagcaacgtcaaattcggaaagaatatattgtactagaatttcacgaatagaattacgtccaattttctggtcgtgtttttgcatgatttcataaagacggaattcccacgcgtcaagaacttgaggagtaacaatattgccggattccagaagagtaacaactttatcgaaagcgaaagaattaactacgtttttgattttagtagacatattattttcctcggttattttattatccaacgagagaattatactcatctctcaagagtttgtatactattttttaagcatgaaaagtaagtaatttgtatcacgcggagtaatatcaacacccatatcaaagatgcctttatagattgggtatttgttttcggttgtatcgaagctgaaactatttccatcacatctaacagtaatagcatctgttaaaatgtcatactcaatcctaacaattgaatccccaattttaacgtcgaggtgttttttgaatttgataaaatctaattcttgggccacaatattttcctcattttaagacgataggaagacatgttattatcttcctaccattgtaaactattaaccgaactttttagcgcctttccagccttcgtacatagctgcacaagtcaatagcacagcatgttgacattctttgtatttgtaaatccagaaccagcgtaaaaagtcttcatcctcaacaccgttgagtttcatattggcaaagaattcggcacgttcttcacgaagttgccatgacacaatattttcaggattcattttgtgttccacgccccattttcatcgatgaacttaatccagtcatttacagaccatttagttgtatcaccctttggattaacatttaaagtatataatccctgcttaaaaagcattcgtttgatattcataatttcctcaactgtaacgataacattcgttagctttacgtttggcttcagtatgagaagtattataatcatactcttctttactgtaaacatcttttttcaacttacgaacttctttgcggagttgtcgattcatttcattcttgacttcagaatcaacgcctttcatacgtttccatttatctgagcggaaaatgttttcaaccatgtctttgtggctaacaccgtcaggagctttacgcttaccaaaatagtcgtaatcgcgaactttcaaatctttacgacgatatgttttacccataagtacctcagaggttgattgatacgacacgtttgataaaattcacttcacttactgaaaggtctttaagaccgattgattctaaacgctgagtaagcgtcaacatcgggatataatcccattgtgttttagtcgtttgataagtacggacgccattagcaatttcaacatgtaaatcggaaatggtaatgaataccagtcgctcgtcattaactttaagggttagaacaactttctttgagtctaaactaatcatggcttaatttccttcgcaattgaacagaagataccacggtcacaaagcatttcaccaatttctggatatttgattgaacggtaccaaacatccaggcttgaaactctggttatctgtactgcattaccgttgacagaatagtactggtcgaccttaatttctttatcttcaattgtcattttattttcctctatagtagatggtttaatcttaacacatctattgaggatgtaaactgttttatgaaaatatttttgatttgagaggggcacaaggagatagtgaagtgagggttccaatagattatattagaaatgggataaagaagaccaggcggcacctggtcaatcttctatgatatcagagtcgtatcctaatgaaatcaaggactttttaaactctgcaatattcttttgtttcttaccatttaaaaatatgacaggataacgaatattaagtgaagtgaatcctgcacgtttagcaagagatacgattaaaggacggtcatattcaatcttaccattattagtgaggactttataaaatgtataaggagcattgagctcctttaaaagttttgtaacagtataacatcctggacaacgtccaacttcttcagggatgccatagatttcaatcttgttctttaagttcgagttttgttccacgagaaataattccttgataagcccaataaggaggattaacagaatcctcaccagagttttcttcaggaaaataaacctggataacaaatccagatgcatcaaaggtaaaataaaccgtaggcagttcacctaacaattcggcacgagcattaatttcttcgagatctcgttcacgtccagcccaaaaactaggatttagactacattcgtaaaaataatagtcattaccgaacatatcaaaccccttccaactctctaccacataccgctcaaaactaatcataattaagcctttttatcaagaacagaattcagtttattagtaattttgtccaaacgttcattgaattcgctggaggataaacccttttccggagaaattaaactaatcaagaaaaatacaacagtaaaaggaataagaaaaatagctccaactgccataaacaaaaagaacgttacagttgtaagaaaatcagctaaacctttacgaaatttatacatatttacccttaattggttaaccaagcattgataagcactaaactacactgtgaataaaattctggaccaaaatgaaaaatcatatcatttatagtatccataatataattcaatttaatcatgtttccacaccccgttggtatttgaccaaagtcgctgattatctgatcctcgccacaactttttggtcggaagatttttctcatacttaccatcaataataacatcaacatatttaagcatttctagttgtttaatatcttcaaacttatatcctgtccacaaccaaatgcttttattgggataaagatttttaatagtttgtaccacagagtgaatcacgtctctgttatcaggataaagagggtcacctccagttatagttaatccttctatataatcattattcaaacattcaattaattgttctagtgtttcaccagtgaatggaataccatttctagcattccatgttgatttattataacacccttcgcatttatgcaaacaccccgtaacgaaaagaacgaccctacaaccagggccattcacaaaatcgcaaggataaaatctatcataattcattggtgtttaaccctatgcatgatttctttatttttgcctagattaaatccgcgctcgttcggatttcccaaataaccgcaagtccttcttatagtgttcatctttttaggatcagtttctccgcaaactgaacaaacaaatccattttcagtaggagtcatttcatgagtacttccacatgtaaaacatttatctactggcatattaacaccaaaataatctaaatgttgtgcggcataatcccatacagcctcaagaccttttaagttatttttcatatcaggaagttcaacataagaaatgtgaccacctgtcgcaatgaaatgatatggggcttcgcgagaaatcttttcaaacggagtgatattttcttctactgaaacatggaaactgttagtgtaccatcctttatcggtaacatcttttacacttccatatttttcagtatcaagtttacagaagcgatagcaaaggttttcagcaggagtagaatacaagctaaaagcaaaaccggttctttcggtccactgcttaagacgagcattcattttagttaaaatttcttgtccaatatcacgaccgacaagaatattcaattcgtgaataccgatgtatcctaaagacactgaacttctaccgtttttaaataactcaattatatcatcgtcgggtttaagacgaacaccaaatgcaccttcttggtaaagaataggagcaacagtagctttaactccttttaaggaactaattctacacatcaaggcttcaaagcacagatccattcgttcattaaataactcaacaaatttctgttcattgaactgtgttccaatataagaatctaacgcgatgcgaggaagattcagtgttacaacaccgagattattacgtccatcaagaatttcattaccagtcgaatctttccatacactcaagaaactacggcaacccattggagaaactggaactgaagaaccagtaatagctttattattcttaaccgaaataatgtcaggatacattcttttgcttgcacattctaacgcaagttgtttaatatcatagttcggatcatctttataaagattaacaccttctttaacaaacataacaagtttaggaaaaataggagttattccatcacgaccaagacctttaatccgatttttcagaattgctttctgaatcattcgttcggtccaatcagttccagtaccaaatgtaattgttacaaaaggcgtttgcccgtttgaactaaaaagagtatttacctcatactcataagcttgaaatgcgtcatatacatctttttctgttttagattgagcataattcagaatgtctggtatttgccatttttctgcatcttcaacatgtttagcgtatgtacgtttaacataaggagaaagaactttatcgacattcgcaaatgtagttccgccgtactgatgtgaagcaacttgtgcagtaatttgtgccataattgcagtagcaacaccaatcgatttaggcgtttcaatttgagcattgcccaatttaaatccgttctcaagcatcccctttaaatcgactaaacagcaattggtaaacggaagagcaggagaataatcaatatcatgcatgtggataattccactttcatgcgcattcataataaaagacgggaccatatttttggcaatgtgcttagacacaataccagccataaggtcccgttgagttggaaaaacacgagaatctttattagcattctcgttcaaaagatctttattagttttataaattaatccttcaatttctttttcaattttcattttaaactctttctaagctgctttttgaatgaagctattaattgtgttttagtatcagattcattatattcaaatcctctttgaagcatctcagccatcatttcctctttacctagtcttgagaactctttagttttgactggaacaaaattaggatggatattattatcagaataatcttgtttcaaataagcaagaagagcttcaagccattcgaggtagtcgacatcacgacctttaagaccagaacggttgaacttatgcttcatttggccttctgctgcgttgcacagagaacagagtaacccacgaactctaccggcttttggcccatttaattcgtggtcgtggtcaagatggttaccttgaacatcagggtctaattcacggtggcaaataggacacttaccgttctgtgcatcataaaatttttgtttttcttctttatattttgcgcctgataataacatgataaacccttaccttaaatagataagggtatttataatttagtaaatgttataaaagttacgatgagaacgtttagctttgcgaagctgacgtttagtaggacgaactgtaaatggttgtccagagaaaaaattcggatcggttttaataagcaaataccaatcacgcttgccattttttaataaacggtacaataatttaacttgcataataatctcttcccatttccatatcgattaattcatttattgaaggttcatcataacatggttcttcgtcgttgtaaactgtttcgacgtctggctcgacagtctcccatcgagcagaataccacggtttaaccccggagtttattgagctcttcataatcaatccaggattctagccctgacggcaggtcacattcaatgttccacagaagctcttcaatggcttgcaggcgattatattcttcaacggtaatggtaaccattggtgcaaccggttctgcctttttaaccatcatatcgttcatcaggacgtaaaggtcatcacgaacgacagtgtcgttccaaccccatgatttggcttcgtaagctaatgatgaagggagcacatttaaaacttcaataatagttggagcatcaggaccaagttcattggcacaaacttcgtatacatcttggaaatctttaagatttaatgaatatgtcatttaaaatattctcgcagtttattgttctacccaggcacaggaaacttcgaaatcaggaccaccgtattcccagtgatattcaccaacaggaatccagtcaccgtgctcgttttcttcatagtcctcagcctcaaggccaacgaatcgccattggacaccgatgattcgattacccattaatatatgaaattcaccccatggattatcgatagcatattggatatcgttcttagcacgagaacacatttcttgatataacaaagcttctaattcgccctgatcataagggcccgggaaagttaaatcaatactcatttaaaatattctcgtagttggtcaaatccaccaatatgacttccatcaggagcaaatacttgaggcatagtcaatccaacttgtgattcacgtccaagcttaaccagaagctcagcaattttctcatcatcaaaaacacctttttctggcataacattaatgaattcgaatggctgtttcttaacagtcagcaatcgtttcgcattatcacaataaatgcatttatgaatagtagagtcatacccgtacactttaaacattatttttcctttcatcgattaaatatgcaatgccaaatacaatacatgtaataaaacctgtgatacagatagaaaccaacaacactgtaccaaagaaccaaatcaagttatctttagtagtttgtttgatatccatctcacgaatttctatagctatcgtatcacctttattcagaagcgtataaaacgacggtgatacacgcctgtcaaaaactcgtccttgctcatctttatagactgcaataaattctaatttagaatattttcctgtagattggcctgagattaattccactacctccacaggaattactttagtttccatgtaagtattctgactgttccaaatgaatggaataatggcaaaaactaaagctgcgataaaacaacgaaggctatatctcattataatattctctcaaatttgtggaagcatttacggcatttcaatttcaagttatcagtggtccagttaaccagttggacttggatagttccacattccgggcatggatgttttgctgctgatttggcagcattttcacgtcgttcaaccattttcattatttcgttccatgctggaggaacgaactcttcttcaccgtggattttatctcgctgaacaaattcaatctttgaactatcgtcaataaacttaaccaagccatgattagtgctcatatcaatatcctctaaaagacgtagtttcattataacacctcaatggcatttcgtaaaccgtccgctttcgcattcagagcttttaacgatttagtctgttctttaatctgggcttcgacttctttcagacgagatttgagatattcacgttcttcgctcaagttgtcaactttttctactttaggttctttaatagtcttaagtttatactcgttagggttcttcagcttaattcgggtgcgagaactgtataacattgaaccgttatcttcggattcgtcgaacgtttcaacaacatccatagtctctaacaatgtaataagtttataagacaatgaacgaacggttttgttatgcttattaatttcttcagctttcatggtaccgagattacgtgagtagtaataaggaacctggatatcaattgataatgatgcgttaccattaccggtcggtttgaatactgcagtaacccaatctttaacatgaactttatttgtacgaccatcgccgcccgtgaataatttacgagaatgtttaaaaagcatattcacttggttattgaattcacaagcaaatttatcagcgaatttagtttcaggaatggtagataaccaatcagccaaatgagtctttttaacatcattaacaatagtgaattcaaccaaatcggttttagatgtcacagatttaataaagctcggcttcataaagtttttaatgttatcgcgagctacagtagaagataataaacgagaacgtttgaaccattgaagcagtgtccctaatgaatgagaatacgcattctgagtatctttacagatatgattttcttgacctgtgtatgtaccaaaatcgcgaagaataccacttactacatctcggtgtggaacatcaaatcctagtgcaccaacagcgcgctgggcatgaacgttagcgataagaccggcaaagtattcaatgtaatgtgaacgtgtcataatattttcctctcgttaagatagattcattatactccaaccatccttggttgtaaaccgttttatgattttaatgcattcattgcattaaaaagtttagagtactgcaactggagattcgttacaacactttgagcatcacgaagcttagcttgtgctttgtcaagttcaacggacagttggtctacagtagccttgatttggttgtaatgataatcttcggccggaagaaggtcattagaaacatttagttttactgccgacagtttgcacacatttggcaaacctttaaacataccgggttgtgtcggagaatatgcgcttagaacctctgcattaccgactggtgttgctgtgatattgccttcgaacgttgcattttcctttttaagattttgatagtattcagagtctttgtgccaccatggcgcaggaacctttttaccaatagatacacgagcctggatagcgatatggcccttattcttgatagggacgataatattaagctcacgagaataaattgctttaatctggtggatattatcacctaaaacttctaacgcttggtggaatacacgagcaacgttatcgttcttaggtttatacgtgagagtgaactcgttctcactgataaccatgatttccaacttatcgtaagtatatttcaaatgtttcatgttaattgcttgaggacgaatacgagaagcaatggccatcagattgttaaggttattccggaactgcttagcgaaatattgtccttcaccgccaatacaaaaattacgaagtttctgtttggctaataaacggctgaactcaccatttttaatgaactctttaacgggcgtgttagtaacacattcaaattgagtaaacatacgagaagtaatcccataatacgaacagacttcctcaatctcttcaggagtttttacaggcatacggataggattaggtcctggagtatatgcgttcgaggtaaattctttgataagttctctacgtgtaataaaagccattttatattcctcatgttgaaaaatttattatactccaaccatccttggttgtacatcattccttaagaagttttactacttgaataagattagctcgttctgttttatttttaccatttaagcctgctaatcgtgagatttcatcgtcagtctgttgaatagttacattaagttcgttaatcaaagcttcaaagtatttgatttgctcagcatgttttgattcaaatttctgaaccggaataacgtcttggttcagttcatcaataaggtctttaagagcatcttcttgattgatatcatattcaacttcttttatttcttcaacgaactcgtttttatatctaacatcttttagtcctggtgccggtcctgaaatctcttctttaagagtacaaacatacccaatacggtattgggtaccgtctcgcttgatatcaacttcgtcgataaatccgcaatgtttaagaccagagccgattaggtcaaaatatccttgacgtcgtccttcaaacgttacacgaactactaagacagttttgccagcgaccttttgaagctcacatttataaaagttcgttgaacctgaataacgtggatgagttttaaagttcatctgacgatctaggcccatttgtaaacgtgctgttacggccataaaacgtgtttggttctcgttaagatgagcaacaatccatttcaaaggcattttaccctgttcacgaccgaacaaatcagtacatcctagattacgcaggatgttgttagagttaatcatcgacagaacgttaagtttattcagcgcgctgaagattccatcagccattgattttccataacctttacacgctttaataagtgctcgcggcagattagtatagatttcagacggcatatgaaaatcaaatttactagtcagtaattgatgaacttggatagcaatttgctcataattaagtgctctgcgatcattatggtctttaaaccacactttaatctgtgaagcacataaaccgttaatttcatgttttaccgcatcagatgtaatactcataactatttcctcagattgaattggaactcaaaaccattataacccgtccttgggtaaagcgtttatgcgtgaaccgtctttaaacgttcttcaaatttccgaagagtactaatacgttctgctttctgttttgtatagtttgcaatacgttctgaagtgagagcgtatcgttcgtttactgtttctttcatgaagtcagggatttcacgagaagctttaatttcatcaaacttgtcgagtactgcctggtcttcagcgattaaattttcgtacatctcgatatctttcttgataaactcgatatcttcctgggttactttggataaacgagacgctttatcctttttgtactgctcgttagtttcacgagaccagaataatgtacgttttttgttagtgtttttgtagacttccacaattccaactgaatcgatgataacaatccaattccagcgagatttgaaaatctgacctccgtccacggtaatctcgttatcataagcaacgtcattaaagaacttgctttgtgcttcagatttaaatttaccgtcgttataatttaccaggttgaaaatatctttagcgttcatgttttacctccagtagttgataggtctataataacataaccatagaccttgtaaacaactaaaagaaacttttttcagtattttttccactgaaccaaacagacttcgggattttttgtaatttttcagacttaagtttctcttcctgttctttcttatatactcccttgtcgtactggagcatctctagggcattcttttgcaaacgatctaaggtaattaaggctttagtttttcctttcaaggaagagtcctggcgaacttcctcgctgtattgcatcgtagaactaaccatacgatgtgcatacagttcgactgcggctttgattttttgcataaaatccataacatatcctctttgatttgtacatcattatttttaaatatttctatgccctcagtaggttcctggtgtccttctttgaggtaagccatatggttattaatctttatggcttttgttacctcaggacttcctgtaagcttatttcagtaaagttacttcagagatttcctcccaaccatctttatcagttgaaataaaatctgctacataaagagccgtacgtaatgatacattgcgaagacgagatacgttagccttcatccaggacaatgctttgtacgtttcagcatcagtcaagccacgtttctgcatcatgtcagtagataatattacatcttcaactcgaaccataatctcttcattagagtgtactccaaggtccaaatacactgaacgagatactaaagcttgaaggtgtggagcaagtttcgaaccacgttctaactctttatcgatatcaacgtttgtaatgaaaacgatagtaccttcaaactcaaattctttatcgatacccttatcatcaagataagatgatgcagtgctccagcaaactttgcgtttatcaccggtatctaatgctgctttaagaaggttcaagatgtccatatccgagaatacgtcaacgtcgtcgattaagagaacgctgtctgcatcacggttgagccaaagttgttcgtaaagacctataccagagattttaccattaatgcttttgtatttgatgaaaccattatcattagcattattaagtgctttatccagagaatacgtcttaccaataccggctgcacctgaaataatgagtgaacgaattttgccatcgataataccattagtcatcatgttcattactttaaagcgtttgttgatacgagttttcatatcttcagtgctttcaacaactgcaaccggtgatgtctcagctccttccattatgatgtctgatttgaagacccatactccacgttcagaaccatcgatcataacgaaaattttaccatcacctaagtgggaacattcaggattaagctttgccgggaaccatgtctttgtggcaacataagaaccagagatttcgttattacgatagataccttttttgatttgaacgttgaacattttattctccaaatttactcatttcgtttcgataggtctataataacatgtttaaagcaaaagtaaacaattatttgcgacgagattttttggtaagaggttgaaagaacactgctttaccggcaggagtcaaagtgactcgtaatgcattaccgattcccaaggatgctttaaccagacctttagatttcagttcaccgaatgcttgacgttggtctgcattacgagtgttaaccataagacctttatcaccagcttcacgaatcatttctagcattttggttttcattttgttttctcctcttgttttgataggtcctataataacatatcctaaaagcatgtacactactttttaaaaatattttgaccccctaaagggcccgaaggcccttatcatttatagtatgaattatgattttcgagatagacttgctcaaggaaatcatcccagaaactcatatctactttttgttgcataccgttcttagcggcttgttctgacgcgtgttcaacttggacaacgatatcttctaggaattcttgtacagttttaaacgtatgtttaccaagcttaacatcgagaataaatggagcatcttgaagtgggtaaaccaggtcgccggttctgtaaatttccaataattgaagtccaccacgacatgcatgactcaatgctttccagtcaataccttcgttagcttctgccttacgagcacgttcaccgtagttctcttccagtttaaccaggattgcattgaactctttattggttaacgtgtcttggaatttacggtctaacagattatagaatgtttgcttacctgttttctcattttcggtttcaacccacgaagcaaattcacctataggcagaacattcttcatatgtgataaacgaattactgcaccgttatcaaagtatcgtccccattcattagaacgtttaagggcttgacgaagaacagccagtcgagaacccttgacgccatatttagaagcttgcttacggacataccctaaataagatttcatgttagtggtatagaaacgagacctgttatcttgaatatacttccatacatcaggcaaatcagatttaactactagacttggtggagtgtgaagcatatctaatgcgacggtttcaccatcagcagctagtttaaagaaatatttgagactatacaactcatggtccacgtcgtcttttgtgttcttagaagatgtgttattcgtgttcttgctcatatgttctttaacgttaccggtcaaaatatcacgagcatgagggacataaatttctttaaaatcaacgtcagattcaggagtagacgttccataaaggtggctaccaaagtaagccttaacaatcgttttcattatttagccttatattcaagagtaggacagactttttctttacgagctttaaggtattcacctattaatgatttcttacgttcaataggctcaagtccatttttaattcgttcttggttttgtgcaatgagctcaatttctttataatattttctgtcgttatatttgtctaacaaccaagacggaccaattatcaaccctgtagcaataaaagccatgactgatacaattaaaatgcctacaccaattgaagctggaactaatgtccatagactgctaaaaacaaagaatttagttaaaatttcctggccaatgattgtgactgctgctaaaatcgcaaatccaataattgaagcagccagtaccgggattaacgttttccaaaaataagcacacaacgttttcgggcgattccatgtactattgaacgcggcataaattttaaagtgccaagagttttcattgataatcataataattccttatttcaaagtcgggataatagaatcgagataagctttaagagcaactgcttcatctttgtctaatgtaacgatatgttgacgaaggtcatcaatttggcgaataactacaacatcgccatcttcataagaaggattaacgcctaggaccgttgtatagtcagggcggtcctgatttgtaataaaagcattacggcatttagcccattgaagtttggcctttttggctgtttcagattccattaattctttcaccttagtgacgaatgttttccaattattaatagaaaggcattcatcttctgtttcgatattaaccccgctataaagaccgtgataaaaacgaacttgaaggtcttcatcgatgttaattacagatgcatggccgggcggattgagtttcaaaatcttgtccagttccataggaagaatagtaacagaatcatcttcttgtgtcagaacatacacataaccacgtttttcgatacataaatcaccaaacaactcggttgtttcaattacaattttcatattattcaccaattaaagtttcaacaaaattcaccaaatcattcagacaagcatcaacctgtttttcataaaagtcttcgttatcatttactgcatgataagctacatcattcaaatctgaatcggcttcacgtaagttacggataagttccatcaatttattagcttgttcacgggtcattttaccatactcgtttcaataagattcactatgccgtttaccatgttataagtaaacatcggataattgtattgtactacaacataagcgataagcaaaagtttcattttgttctccgttcgttttggtaggactactataacataatcctaccaagatgtaaactaccgattgtgttttaaatgttgataaagttcttcaacttgtttagggtccaaaacaattaggtcattttcttggcgaagataaatccatctcttaccaccagggccatttttacaaaacatcaccaccgtatcatcatcttcagcgctttcaggtaaaagttcaagcacaccgtcttcagattttccagtataatcgtaaagcataatatcctcacataatctcgttaacatacatttgcaattcggtgtgggtgtcagccatctttttcattgccttattgatatcaatatcgccatcttcgcacccatgggcattctcccaatcagatacggcattagcgtactcttcaatcaaaaacattaacttagaaattttttctttacgtgacataacgttctcctctagtaagtaaagactactataacacaacctgcggagaagtaaactgatagatacaaaaaagccccaaccataaggaaggggctagtaaattaaatagatgtaggctctaattttattttcatgaactcagcaaattgtctggcagtttttatgccttgttcctggcattcaaatgcatcatcacaggggctatttttgtaatgctttgccatatacttataaaatttttcagaattctcaacattttgaatttcgaacaaagtatatacgtttttaatccctgattccataaagttatcaaagtatgggtcaacatatgcagtgccaacaataggagtcgttgctgcaaaaaaccccagcatcgccacaatggctatcgctcttaaggccatatagcctcctgttaattttggccagtatttatttttcgcctttgaacggccttaacatctgcgaggtatttttccagctttcgcttgcgtgtataatcagctttagaaccagtttgacgaatatcctcgtttaaatgagaaatagaatgtcctaattctcttcggatttcgtccaattgggttacagtaagattacgaagttgtctttcgtttaattgctgcatatatacctcttggttagatattagtatttataacaaccctgtcaaatcattccaatgcttccggcataatgacacgtatctatcggtatcaccaatttcaatttgtccaccatctgtaattggaagcccatcttccgtgactctagctaccattgtggcttttttaccgcaatgacagacacctttaagttcaacaagcttatcggcaatagccattaatgcttgagaaccttcaaatagattacctttaaaatctgttcgtagtccgtatgccattaccggcacattgtatacgtcaacaatacgactaagttgatacaccttttcagtagttaagaactgagcttcgtcaacaaatacgcagtgaatatccttttgtgctgcagcccatttatagaattcaaagatatccatgtcttttgtaattatattggcatcctgacgaataccaatacgagagactatttcaccttttgaatcgcgagtatcaatagccggtttaagaactaatacacccatgccacgttctttatagttatgtgcggcagtaagtaatgaagcagacttaccagcgttcatagcggcataggtaaaaattaaactagccataagagtcccttatagtgaattcacgtagtcaatgagttcttgttctttcctgtcaaatgattccatcaatgcttgatattcttcgtctgttaaaggagcatattcatcgtacgcattagtggctgcttgctcatccaataggtcatggataagttcgaacagtttagttttctcttctttagtcaatttcatttaggttcaccttctttaacgaaatctgggtaagggtaaaatcctgagtaaaacccttcacctttatgattgctacaacctttgttcgaacagtaacaccaataatcaaaatcacaagccatttcgtcattgcataaagcaaaaactacaggccattcgcatttttcgcatttagcacctgtaagaatttttgtttggctcataacaatggttcccaatcaacaatcacaatttctagtttagtggaatacgtatctaaaatctcttcgatgacatcccagtttccaccaccaatacctgcaccaattcttggcatataaattacaggctttgttatcttattttttccgaattcatttaattctattatacaattcattaaagcagagtactcaaaattaggtcctggctcaaactgtgtataaagattaaagcaataagctttatgggtcttaaaatatttttcataaaccgaataagtcccgagtttagtctcgtctccgaattcggtttgaagtttatcggcttctaaaatttttggataagcctttgccaattgacctgctacaccggcacccattgtatgaaaacaattgcacccatgagcaatattattacctttagaaaacagggcgacaatatcgcccttgatatagtttttaatcacttgctacaagtcctctagtataagagtcaactagacggtccaccatagaattgcatgctgccttatctttaggttccgccaccgaacattctaatatttgccattttttatagtatcttttaattaaagtagacgccttgaacctactagacgccccatctttttctccgtctttatacgcatataacaatttttgtgaaaaatctactttacactcttgacttttaccacaataatcagacgccgttctgtttgtatactccgttacatcagtatatgtagtattagcaagagcgttaaatgaaaccaagccaactattaaagccaacattttggtcattcttttacttccagtagtttatttgatttaaggtaattagccttttctaggacttcagaagcatatttacttccagcacttgtcttccatcccgcattatatgaggataaggctttccttatatccccattatgtatatttaaccaataagaaaattcgatataagcccatctggccgaattagaccgcttagatagcattttcttaatttgggcatcagacatattataaccaagctggttaattcttgccctcattgttggtagatagttttggaacattccatacgcatggtgacctttcttatctttaagattaataccggcagatgattcttgccatagtattgcggccattatgtatccaagtcctttcttatgcatattttcatgcgttttaaattttccgtccttagaaaactgttccccaaactgataagcataattcaagttatcgagttggacattactaaaagtatgctcggagctatgtgctgataacgaaagagcaaatagaccagcgagtagtgcttttctcatgtttacctctagattttaatcactgctttagaagcttttcctggtagtcgtttactgttaataatagccattctacattgaagagtcttcattttgaatgccggattttcgcgacaaactgtaagacctaaccaaagatttccatcagttatttctaaacggcctgggcgatattcgacaccttcgacaaaatcttcatcaacatctggacgtgccggcattgataaaaattctgcaacttctttaacatgattttttactttatgaaataattcaaaaacgtaattctcatctatttctctctggatggcacgatctaagagatgttgagaatacttgatatgaaagcctggtagtccaagagactttgcagcatcttttataccggcatttattttgcggaactccgtttcaaagattcgacggagtttattacggcggataaaaacttccgaattgatagtcattttgatttctcctctagttgacaagtctatagtaacacaactagaggagaagtaaactactctttgaaaggaattaactttttaactgctttagatacttcgtcacgaacctgatggaagttcttgagctgttcaaggcgttgttcgtaatacgcaatctcatcttcttcaagacaatcgtcagcgtcttctttcagatatgccttgtactcattaaagagggcccataggcggttctcaaagtcatcaaggctttgaattttcttgtgcttcggaacaaggccaaaaggattgctttcagttatgcgtctagatgcttcataatgagttccaaagcctgataggatttgagccattagtatttttcctcaggtcgaaatactgcacgacaggcccacatgctggcttcttttagatgttgcttagcatacttaagagcctgtactgcatccatatcttctttggtttgttgctctgtttcattttctttcaagatatatgcttcttcaatcagagcatcaaacaacaatccaagacggacttctgcatctttaatagcgttcactttaccgattttatcgtcggtatgtggcttgtagcctttaatatcttcaatcgacataaggaatttcctcatcggtggcaaggtcatattcgaccaattggataggctcattaataccatatccacgtacagtgatatcagttgccggatagtttccagtaatatcacccattctaaatgcttcaatgaatgattgctcgcctgagcaactaaaccaggcggcaaaacattttaaaacatcttcagacccttctataatcaatttagccattatagactctcagtaaaggtacgagcgataacgtcacgctgctgttccggagtcagagagttaaagcgaactgcataaccggatacacggatggtcaactgcggatatttttctggatgcttaactgcatcttccagagtttcacgacgcagaacgttaacgttcaggtgttgaccaccttcaattttaactttaggttgatgttcaatttcaatttcacgggcattcaaaccgtagaaaatttccgggtctacaatagcgtcttctttaaaagtcttagaggcaataatccgggcttgagtaccgtcttcaaaataaatagtgcctttgtgtgtgccttcaagaatttgatatgctttcatataacctcaattagaaaataaatttatccaagttttttctttaatcaaaaatgggtcggaattaaacgccattaaactttgagtgattaatcccttaaatggcccatcaataaattccattttgaaatgcggaatactagtcataaaccgtgcattaggagcagtacaaagaacctgctgccctgcgaacgggcctttagtcaaacgatatcgtttaggtttaaaatggtaaatctcataattttctacaagagcccttttattgcatactgggctgttataacaatattcaaaaacttcaatagtggtcatcattgcattccaatcacaaaaaattgaggacgagcattaccgccgatgcaatatttgcttttgcaacagtgttggactgttttaatatggacattgtaaatcttatccatatcaggagctttaataggctcgtcaattatgtacagaatacgagaaagcgttaatccacggaatttagaaccttcattgccaataaaactacggacagaatcggtaaataaacggaatcgaatatcatcgctagaataacgagaaaattcttttttaatgttgccagcagaaattttagcataggctgaagtattagaaagaacaataactgttccaccgtcatacagccaattaacagcaaaattagttactgcagtcgatttacctgattgtctgccgccgtctaaacgaagtgtacagtactgcttgagtacgtcttcaaatggtggggcataaccgttcttacaaatttcttctactctagcatcagaatggtgtgtaaaagcattcatcagggatagataaggaccagttaaaaatgttctcatttagtttctcttttaggttgggccattccgtggcgcatgaattgtccatttctgtatttacccctctaagtaattatgaatatactatcacaattctaggagaaagtaaactgttatttacctttaattactttagctgcttcgatagccgcttgctgaaggtcatccatagacataccgaatttagaagcaaagttatcaattttcttttcgacagcattcaaaggcttggcctgtttaccttcattagcgccaggaagagcgagaatacgctctttgtcaatataaaggcttacaagtttcttacggtctttatcggacaaatcatgaaatgaatgggcctttttatttatagcggcttctaatttacctgcactcactcgcgcttcagtaataaattcttgatatgttttcattttttgtttccttgtttgttttgatagagtaattataccatattaatacttaagcgtaaacaatttaagctttaccgccagaaataattccgaagttgttaaaatcgtatccaatatcgtcaacatctactttaggatttactacaacataagcaatttcactacgttttgcataggtgttgatttctttaccatcgccacctaagaaagaatacccattacgttttaatgagccaaagtcttcggcatcaccaatgaaagctttaactttaaatttaggacctttggcatctgcttcaatgataaattcttgatacattttcatttttccttagtaaattgatttaccatagtatttgtaccaagtaggacgttgagcaattttttcatctaagcgtgcttgacttatcgcaacggacgcttcggacgggacataattattacgaaattcggcagggatgtcggaaatatcctggactgtcgtgtccttgattttgaaaccacgtttcaagcattcagcgattagctcgatttgtcgtaaacgtaaaaattcaagtttgtcgtaaaagaatgttacgtgacctgtgcctaagataaatgttggagagattttaaaatcctttacacgtttaccgttttggacatgtttacggactgcactaaatacgcgtggtaattcacgatactcagccataagatgttgatcggtcagttcagaaacaagtgttaaattgatacgagtcataatttcctccaagtagttgatgaatgtatagtatcaaaacccttggaggaagtaaacactatttttctgaagcgcctgaaatatatttttcaagacgttgtttcatcagcgagccgttcttagcgatttcttccggtttatcgcacatacgtaacaaggcttcaagcttagcgatatcgctggtacgttcaaatttgcgagtatctatcttactagcaagttcagaaatacgtgctaatagactttcggcttcaaccaaagctgcacctagcttagttgcaaatgtgtcagtagcttcgttaagaatagattctgataaaaattcactatatgttttcatatatacgctttccaagttcctgttttaaatgttgagattacgcgtttcgcgcgattaggtgtctgacgataccatttagattgggcgagatttactgccgcttcatcccaacgtttctgttgaagcatacgaagagaattagtaaaaccagcaacgcctgctacacccatttggaagaccatattgaccaatgcacatcgacgaaccgcgtctaaagaatcatataccggtttaagtttagcattacccaagattccgcgaacggctttatcgacgtcttcattaaatagcttttcagcctcatcaagggtaattgtaccgttgcatttacgaccgatcattctgtcaagttcagctttagctacggctaaagacgggttctttgttactaaatggcctatgccaatcgtccaaaagccttcagtgtctttgtataaagtcagtctaagaccttcgtcattacgaagcatttcaaatatattcataatacctcccacgtttataggaggtatttattacttataggatggtagtgagcaccttatataatgatttgcccattacatattcccattgagaaggtttaattaaagcgaatgcatcaaattcaggaatctgtcgtccgtccgggaatgtatgatatgaattacaaacactgtttctgaattgctcgtgctctacagggatggtatataggaacagatgaatattcttattgtctgagtaatgatgttcacctaggtctttcaggaaggcagggtcatattgtgtaaacccagtttcttcttcgcattcacgaatagcggcttcaataggagattcgccaggttcgacacggcctttaggaatatcccaccgatgagttaatgcacctttaggacgagaaccagttacacgccccatgaataactctttatcttcggtaaggaaaataataccggctgatagctctttcactttatttttcttactcatcatctcggtcccatgatttggccattaattcagacataaattcttcaatgcgcgtttctttagatggactttcactattagagaccgcaagtttgtaatctgcaataggacagaacatatcaaggtccatattaagatcgtctttgattttttcttctgacacatctttatcatatgtgtacagataactatcacatgattctgatttaatgtaaattgctatactcatctcaaattcctgcattcggtaataaaacgttcaacttcattattcttggcctttatcttgtctttacgttcctgtaaactacttttaacaagattaataatgatgcctatagtacctccaccaataataccaccaataatacttacgatagtagatgctaataagatagcgataatatctggtatggcaaaggcacttactttagtactaaaaaaccataccgacggtacaaatataatccatcctgttatccattgacacttattgaaaaacttttcaagatcagcttgagttgttcgtattacttcatcgataggttgatatccattaatgtatctgttcacgataatacctgctggctggtcgattttaaattcttgacaaatacgtttcactaagtaggatggacatcctgtccaatctactgaatagtatgaaataccttcattgccgtcgtcaatattagaccaatatgttttgttaatcattaccagccttccatagggaattccagataaacttgggcattgacacgaatttcattggtaatctttttaactcggtctgtattacgagatacacgtccgaaccaacgccatccattactaattgcacgagaaccagtgtgccatgtttgccaatcaaactgaagaagagtacggtctggagcttcccatttctctagttcacctttttcaattttttcgaggacttctttgtgccattggcgatagataagttcgccatcaggaatctgactgaactctgcagttcctgttgcaaaatgagtaggacacacgtcagcgttaacaagaccaagaatatgttcagaatggtaacgagggttatcatagtcaggttgtcctgcagtaataaagtgttggccgactggaatatcagggcgaggaacatcgtcatggtgatatccaggaatagcaggataccaaccaggcatcagcatatgaacccgagaatcaaatacaacatgttgattagtccaatcaattgggagattggcaataaagctacgagtaataggaccgccgttatcccaagcaaaactcaaatcacagttaaagaacattggttcatttttgattttgtcattttgtacgttatgagcaaaaccacctactgcacgagcttgactattaaacactttagaactattcatattattttcctcgacattctttaatgaaattttctagattggtagattcaatagcttttttacgagcttctgcgtgttcttcttcagacaatttacatttataattaacccagacgttatggtcaaaactagtcgtggcatataataacaaagccccgacgaataataaaaatggtgataagaatacaaaaccaggaacaccatccatatcgtaagccttttgtaatactgcaacagaaagagctacgtaaaaaagtgatacaaatatagttaaaagaccaattcggttggtttcgcctaatttcataatattctcctcatgttttaataggactactataacatagtcctataattgtgtaaacagttttgcgaaattatttgaaaggttttaccatatggaaattttgtttaaaacgttttacataatcgtcatgtcctaagctttggtacatacttacaactttgctgtagttttcccaagcgtattcacggaaccagcctgacgtgattgaagtacagactttttctaatgccatcataaaactatcacgtggatggatttcaaagttattaggaatctgagaacgttctaacgctagtacacatgattcttcgtatacgccggctaatttgaccatttctggtaatgattcgaacttctcgcgtgaggtcatgacttcagaaccatctttcatataaaacgtatacgctggacggtctgttagtgcaatggcttcgtgaatagtatcatggtcatacgtatagatgtcatctttaaagaatgcgcttttagaagtgtcaagaactgggtgagcatagttcaaggtttctttctggcgtttcagcataatttcagtaagttcatcgttcagtgtaacacctttaccacgaagatactgaatatggttcatagtctttaaaaagaatggattatttttcttgaaacgatgagacatcttaattgcaagacacatctcaggagttgcccagtaaaacccgttcaaacggtctttagtcaaatttttcttggcgtattttaaaaggtcataagaagacgtgaaatcttcaggagtgagttcaccgactaattcacggacattagtgattgccggaacaatatatgcttcaaaatgagtttcgcgtccattatggaagcatttgaaaacttggacatcagggttatcttggtgaacatatacacccatcatttgatttttgaatacattccaagaaccttggtccgcaataaagtcccagtcactatttttgatagcgctagaatcaataagaccgtgatagtgaagtgcacgagaaccaataactaacatcataatattttcctcgaatttagattacttaaatttcgcgacatgcgatattatattcatcccagaggtcgtcatgtgaagcctctaccaatggaacgattgtgccgtttatgtcttcattataagggcaaattgtacagtgcgcatcttcgaatcggatgcctttgtgttcagattttttataacgcatatcgaatatctttgcaaacttttcacgagtaatagttttagcaactacttctgttcctatactttcgtaataaaccattgttgtctccatttaatttgataggactactataacatagccctatcttgttgtaaactgttttagcaagaataactagatgatacccagccttgaacagtaatactattatttgataacgagattgcgtcctggagattcagacctgcattatcttcaatccacaatgtaacttcttcacgctcttcggttgcaatctggaacaggttttctagagcagctactgccgtacgtacagcacaatctaattcacgagacatatgatttccttaacaagtgtgagaagatgcaacccaaccaccatcttcaaggctcaagttgtagtcgtattggtaaacgtcggcccattcagcataaccgttttttgtacaacgttcaagatcggctttaagatgtcctggtgaatgataggttccacccatgccataagctggatacaagttgaatgttgtgttttgtttattagcaatttctttggcagcctcaatagctgcatagatttttgctacagcttcagccagttcggtttgttctttagacataatgattccttagcacaacgcagaagacgaaacccaagcaccttcagtaataacgtaaccattaccttcacgcttaacatcgccaccattattttcaatttcatctttcatccactgggatacgatttcacccttaggataataagtacgaccgctaccataatcacctacagaaaatgatactgcatattggtctgcgatctttgttgcttcttcttcgatacgttcagcttgattcagaagtttataaattgcatctgaagcggatttggcatcattaaactctggtactttaatttcaataatcttactcattttctacattccttaataaagttttcgattgtttcattttcacgtctagctaggagttcattataactaatcatttgagaagcgtaaacctttttatttttcttgttgtggtttataaaatcgtagtaaaaatagactacagtacaaaatgatgcgatggatgcaaaggcttgggtataccgtaagtcctgccattggtctgtgaatccaccagtgttccctataaatcctaacacaacgccgtcaataagaaatccaactaatccaaaggcaaatcccatgccaatactcataataaaaattagaatgttctcaccaagagaaggccatacggttaagagttgaggcttttgcatcttatttccttaacgaattccatagcttcttcatattcatactttttaacagcttcatcatactgagcttgggcttttgcgcactgaactttccattctcttaatcgggctctgtgatgacggccttggtgccaatatcccacccaattaataggcattaataaaaacggtacaataagtggtgcgacgaacattaatgaaaatgctgcatcagacgatataacttcactagaatctaaaacagctcctataatcataaagattaaaaatgctaaagctaaaatagggccaaatagtacttcatttgggattaatttacgcttgtattcatacgcccagggcttacttggcatgtatagggttggctttgacatattctctacattccataataaattgctcaaggattaaattgttagtgaaattaggactaacaaccatagtttcataaagcgcatcaatagcacttaaagcatcaactcttttaagcaaaggcttgccttcatacatagtttcagaatcgatgattaacgtaaagtaatattttttattatcgactagaacttctgtatcgatataaaacatattagacctcagaagcttatctctaaaaccataataatcttcagagcgttcgctgatatattcccattcagtgtttaaacaacaaacagaccacgtaggagcaacgaaatcagtgaatctaatatcatggtctgcaactagtttagcaatagctccgatatcatgaatcataatacctggggctaataaagattttctgctatggctagccgttttctcggtggtctcataagaagacgaccagtaccatttacgtccggttgcaacatatcgtaatgaatcaactaaggacgtaggtggatttaccttatctcggaactcttcgaacattgagtcaatatcattattttggtttcgcatgttaactcctttattatccaaaaggaggaccggagtcctccgtattattttatttcaaagagttaatatattcttgtacatcagcagaagtggtttcgacaccggctggagtgccattgaacgtttcaacacgagtcagagtgtcttcgatatcaaccttagtcagtgcagcgatttcaatcacatcatcagccgtagagataccaagggcattggctgctcgagtttcacgaatgtattcgagtttgattgccaggttctgacgagcatcatcaagttcaaccaccttacgagcaatttcaattcgcatagcggcatacccgtcagcttttgtattaagttgttcggcagttcgacgatacagaagaccaagcttagcatgcatggtaacatcttgtccttcagccaggagcttacgaatttcacgttccttagaagcggcttgcttgttcttttcattaacaagttcgcgaatacgtttttcttcattaatagatttaacagaagccgtttttagttctttgatttgggtaatcaacttatctgcagctgcgttatactgttcttcgacagtaagatttttagccatagcagtacccagtttagtgcggatgaattcaacaagtttcttcagtgtgttcatattattacctttcaattggtggtttattatccaacgagagcattatactctgctctcaagagtttgtaaattattttttaatcaaattgacataaaacttagcgtcttccgggtgcatgccttcgcagtattcttcaaccatgaacttcttaacagcttcataaggaccactcagattaagctcagttgtccagaacttggaatcttgtactgaatcgatacgaacttcagggtgacggttgcgaataacttcttcggtgtattcataatcaacgacatcaatactaactttagccattttgttttcctcttgatttgataggactactataacataaacttacttagatgtaaattatttcaatgtcacctttagctgctttataaccttcagccaagatacaacagagtttttatctgaggattcaaattcaggcattggactttcaccaatattcacacagtatgtttcttcattttcatcgaaccaaataattaaagtagtcattttgtttactcctctgtagttgataagtctatagtaacaccatccttggtgtttgtacatcatttatttttaattttgcaaattttttctgcttcagcaattgcagcgtcaatgatgctttgtgcaattttattactagttgacctggcaatcacactaagaacaatttctttttcttcaccaccccaaccccaagtcctttgttcgtgggtacctttaactacagctgaaacttcaacagaacgtccaccatcagaagttttaacatctacaacccaatcaccatctttctcttctacccttgatttatcccaagaaatactaatatatgattcactgtcaatagaagtcgccgggtttttctctaccgtaagaccttcactttccagccattcaatagtatttgcgcataaatcagaagaacacctcatcggaaaccggcaagatttttcacctttagatgctgcatcgtacatcttttccaaaatacgcttttgcacgtttttaaaaatagtttcagcagattcttcagattttttattcagttcagtgtaaagactcataatattctccccatgttttgataggtctatagtaacacatctagggaagaagtaaacatctttatgaaatatttttatgccctagataccaaaaggccccaaccataaggaaggggcattctattatttaatttgtttagcagaccatatacggtctttaataagtttttggatatcttcaacatactcaaggctatgagcgtgaggattatctttgaagctatgtgctcgtgccagtttctggccttctgttttgattactaaaagctctttaagaattgcttcatacttagaaataattcctttggcgatatttttttcttgagctgctttagggtctgtttttggcgcaggtgctttacctgtagctttctggaacaattcacctgatgcagctaggcttttaaaaactcggctaacagtattagcattagtaaaaccttcggctttaaaatctctaataaaacggaaacgttcttcatcagaggcgtctttgtaagaatatttacctgcttgaattgctgcaatcgcagcggcttttacatctgaactagattgttcagtcaaaaattcagcgtatgatttcatgttgcttttcctaagttaattaacttatctatttattattatgccaaaagccccaacctttcggaaggggctaagccttgcggcaaccttgtcggggttccacctgctaaggcaagtgtttgtacgaaacgccgggatttgaacctggttattaagcagttgacgctactcaatatttttaaaaggccatatctcgaccatatccgaacgttccgtcaaaaacgctactcggattacggcaaagatatttcctcgaatcgataattttgtgcgccgtttctgctgtgatgtaaggggatattaacaaatcataaagatttattaagaccagtccttactcagggaacatcagtccgacgacttgccggtagcgacccggcttcttattttggcatatcatcaatttgctctcgacgccgacgccatagattaatcgcttcataaacacattcagcatttggtatatggcgacaatagtatagtgattcgcgtttctggaaccgatgttgcaatgggatttcgtttaaaaggtctttacggtcaaagtattcaaaactagttaacccggaacggtttttaagaaacttccaatggccaaattcattttggaaataaacgtaatcagcgtgttgatataatgaattaatcaaccggtcggaaataactgtatcctgttcgttaaaataaaacgttaaatcatgaactaccagataaatattacctttcatattttcctcacttgaagttggtcgagacagaaggattctaaccttcaacctacggattagaagtccgttgctctatacaattgagctatgcctcgaattggtgaccctggctggtttcgatccagctacctatcagttatgagctgacagctctcccattgagctacagggccttaataactttctattatgaaaggcactttagagcacctttggtaatagagggtatgaattaataataacacataattcttaaagcaaatcaatcattttaacagttgacaaaacaatttcttcttcaatataagcaaattcgacacgttcaactacacgcaagaaatcgtaatcatagtattcagaagcatagccaagaatatcaataagtccttgagatatctcatcgcctttcacaaagaacaggtcgaatacgcgggcttcgtcttcttcagatttatcaccaaggtctacttcgatgccaaagacctttttaataaattctggtcggagttggtctgagaacagcccttcaaccagatattcgtagataataagcgagcagtcactgaatggtgtattaccacagtaacgttcagctttagtgctggaatgacgactcttaaatttcttcaagagatatttaaactgttggagctcatgctcttccacttcaaacaatgttttggttttatagttgtcaccatcactttcataggtagtgacatcaattacgtagcccttaggaattgtactgcctaatcgaatattcatttaatcaccgtaccatattaatgtaattatattcaatgcaacgtaatttcaaaggattcttgaaaatatcatattcaagagggcctttttctgtttcaataaagaaattaaagttaactgtgttaaatttatcatcttcacagagtaatttaacctgtgaagacgaacggtcaatgtaaaccttttcaacttcaaaatatgttaaaatgccataatcatcgatcaatgctttagctgcacgttgatcgctttcgtatccattctcgacagattttactttagcataaagaatcatgagtgttccaccgcttcaaaagtatgtgcatttacaatctggtaccagtcaaaattttcttcagcatttttgtagatttcacgaagagcttcaacagtttttcctgtagcaacaagatcgtcaataccgccaagaggataacagtcgtaaccagcaaacagaaggaaattaatagtttctgtaggttctggatgcagaatgccgttatcatctaccacttcaaagaaagtgtaagaaggagtacaagttttaatccaagcccatgcttgagccgctgaatcaaatggtttgcgtatcaaacgacaatcagggtctttagaaggatttgcttcaaaatccgcatatacatgatatttcattttactcaccttttgcaattttatccataacgatagcgattaagccgattagaaatgctactactaatgagatagaattttctgttgttgtcagtagtccacaaatgaatcctacaaacatcgaaaaactaaaagccattgaagcaattactacagcaacattacgaatcagttcagcgcgtttcattttattctcctcagtagttgatagggtaatagtatcaccaccctatctaaaagtaaacggttttataaactattttattccgcgtgatgcaatcgtattctgccgtttaacaccagtttgtttaaagtcatgactgtcgatttgatcggtgcgagcaactccgaatgatgatttaatcttagctttagatcctttagttatagaaataaacatctcggaagaccctttcttaaagtctgatgcagatacttcaacaccgttcttagcaagtgacctcagaattgcatctgcgtactcatcatcaagactcgcttgagtattaataacaaatgtctttggtgcagccgcttcattgataaattctttataggttttcattttattttcctaattaattttgataggactactataacatagtcctattagcatgtaaactacttacagaagggtttttgcaataattttaagctgagctacagaaatatgcttagctttaaacagtgcagtctcttcagccggagagataacaatagtagcgccatctttcttagcagaccatccatcccctaagtaaacagtaccttttacttcttcgccgtcaaccagactaatcattggtttgccctcacgtcctttatttgatttaataacttcggaagtaagggttgcttcagtcagagtagaaacgttagcatcaggtgatataaattctttataggttttcattttatttccttgaggtcgtttatttgataggatgatagtaacacgccatcatccttatgtaaactgttttgtgaaattattttagatcttcggcccaatctagttttaagggttctttgtattcacggtcgagaataaccggaatagctacatcaccactgaatgatagttggccaacgttatatgataacgttatatgtggagtgtagtcgtcgaaatcatgagtagcacctaaagctcgtgcgtactgatgacgacatctaagatattcggaatcaagaactaaaaccagtacagcaccgtcgtcagttttccatacctcaaggtgtcctgattcggcaacagaataactaccactagatgtagtatatggtatgtttacacgtgaataacaaattgttgaatgaagcttttcacgtggtactggattaggaattcttaatttgcgctggaggtcttccagcgcatcaagtgttaattccgaaaatttagctgcgacgtagaggccttgtgaaaagtcctcaaatttcattattcttcttctgtggtttcagctttaacaagttcacgtactgcttctaccaggtcttccagtttaacagattcacttgtaataccgaccagttgagcaatctgagctagggtattctgaagaagtttagaatcgtcagaaatacgagcggcggcatcttgggtatcaagaatacgagatttcagaattacgatttcagactgcagtttttcaatagtttcattggacattttattaccttaagattttttcaattttagaataaagctcttctaacgagccgtcgtttgtaataactaagtcgccttcttcaataggcaacccagcttctgtaatatgtttatcagtggattccgtaccagagcgaaccacatgaataactgtagcacccatcgctctagcggtttccatttcatggacttggcgcgtatcggtcacaacgtagtaatcgaaatcacttccaatataatccatatagtttaatgcaaaaagcttaacccaatacatacggtcaaataaattaacgacaacatccgtaccgagggcttgcataagacggcggatcgaccatgtgtcgttgatattatttatagcttcacgcagggcttcatatggtttaatatctaaatatgaatatccaccttctaacgatgataatactttaacattattaattggtaaatattgactttgtaaataaattagtgcttcttccattaattcaataacatccaacttattgagatttaatggtgtttcacggtcatatccaacaccttcaaagtattcatatttcaactctgtgaatacatcaggattttcagcatgcctacgtccccaggctattgctagagcgtctttaattggatatgctaattggtattttacggatttaaagtttgaattgatgtaatcagcagtagtgtctttaccactacgtttgatgccacttaaaaagattagctccataggttttcctcatataatttataagtgattataacatacggagctagaagcgattaacgcaaggaagggtgtctagaaatggatttagattcggctgcttgacgaggctgttgagatacaatgacttcgccgtctttttctatcgtcatatacgcgtagtgaatagttgctacgcacgtaacggcaggatcagaatcttcagtgtaactaaattcaatttcgctcaaatcggaaatccatggtttatagaaatttgccgtcaaaacgacttcagtcttattgttgtttaaaatgtgcaaagtaacaaactcaggaccatcagcatgggccgtattatgtccggttatatagttattagtgctgagcatccatttatacatgttcatccaggacgtcatgtcttcatcaactataaatcgtacaataaaagggtcatattcaaatgtagtgcctgcgcgcattgcacgtcctaaccccattgtgcctgtcacagtttcaacaacaggaattctcacacctggcagtggagccgtttgagcattaagcacaaaacctgaagttcgtgtactatccgggatatccacaacaaagtttgttatatttgtttggttaaaaatctgtctcgctggacgagtcataagcacctcaaaaacgctttaataaaaatgcagtataatggttttaggtctcttccattaatctggttcaacagaatatcagaagaacggaagagaatagaattaagatttccaaacagtattcgcagagaaacgttttccttttgacataaattgctgagtaggtaacatgattatgttagcccagtctttaggagcgatttctgttattgttcctctaatgtggcctggcaggtatgctttaatcattttgtcagcaccttgaaatcctttcaccttgctccagtctatcttcaactttgtgttattagtaatagtagttgtgctagcatattgcttcagcaattcttcaagaaactgttgacgtgctttaggtgggatatagtgcaagtttaacccgtacatcaaattatgtttacctaatcctaaataaataatcaaaggatatcggtcccagtatggcagagtatctttatgtttagcatcatacacgtaagtataaattttgcctggcgtaggcttgactactttatgaccttttacacttttcttaattgtttcaacaaaccacttagatgatttgttgtttactgctgcgccttcatttctaatcttttctcgtattgaactgcgaaacgagtttatcatcagaagttgacgttcttgcttattgagtttatttttaggtttagattcaagcgtttcaattttctgtgcagtcttaatagatgatgcatatctagacattgcagatgtaaacgacgagtattttattccttttgattctgcaaatgcttttgcagtgattcctttctctttagctttcttgtattctaatcctatctcaatccattttctttcattcatagactgagcaatcttaggggcttgtacgccttcagatataatttggaatatgctcataattaccccttgtatccgagtttcctaagtccgtcttcggttagaactcgaaattttatatttctcttttctgcgacagcagaagcagctttccatttgtcgcagttcacagaccaggtgtatatttcattcatataacgtttctttgctgcggtcgtaagatttgcaggcttaataggtggttgagtttctttctttggttttatttctacaaagaactcttgacctgatgcatctttcatccatatgtccatatagtatcgacgtttcttaccttcagcattacaaaaatatggaattacggctgtttcactaccccatgcaataatttccggatttttatccaaccattcgaaaaagaatttttcccagtttgaacgatacgttattttggtatggtctccacggtatttttttaaattttttgggacccatttaccagagtaggccatgttgtcctccttataaatagtattattatttataccaatttaatattggaaggagactattttgttatttacattcttcgacccaataggatatagtgctaaaaccattaataagaatgcacctactattcctatgacagacatatttcgtaactataaagagtactttaagcgtgttgctgccaattatagattacgttcttattatattaaaggctctccacgtcctgaagaactagcaaacataatttatggcaaccctcaattatactgggtccttttgatgtgtaatgataactatgatccgtattatggttggattacatctcaggaagcagcgtatcaagcgtctattcagaaatatgcaaatgctggcggagaccaaattctttaccatattaacgataaccgtgagaaattttacaatttagtttcatatccagacgagcctttagtgtggtatgataaaggtgatgaagctcgtaagtatccgcaatataaaggacctttggctgcagtagatacttatgaagcggcaatattagataatgaaaaacttcgtaaaataaaaattgttgcaaaagaagatataaactcgtttattactgatttgattcgtgagatggagattgcataatggaaatgattagcagtagccttaattggttcgtgggtgttgttgaggacagaatggacccattaaaacaagggcgagttcgagttcgagtcgttggtcttcatccagcacagagagcacaaggtgatgtacaaggtattcctacagaaaaacttccgtggatgactgttattcaacctattacgtctgcatcaatttcaggtattggtggttctgttacaggtcctgttgaaggaactcgagtatacggtcatttcttagacaaatggaaaacaaacgggatagtacttggtacatacggcggaatcgtacgtgaaaagcctaatagacttgaaggtttttcagacccgactggccaatatccgcgacgtttaggtaatgatacgaacgtattaaaccaaggtggtgaagctggttattattcaaactctaacgtaattcaagataacaacttggattatggtataaacccagatgatacagatttggcaaatattccagaagatgatgaccctaattttacaataacagaaatgttacgtcgtgacgaaggacttcgtgataaagtgtattgggaccatctagggtatcctacagtaggtattggacaccttatcgtaatggaaaagacccgagatatgtctcgaattaataaattgttatctgatcaagtagggcgtgaagtaacaggaaatccagggactattacattagaagaagcaacagcgttatttgagaaagaccttgctaagatgcagaaagatattcgttctaattctaaagtaggtcctgtttatgccaaaatgaataggtctcgccaaatggcattagaaaacatgtgcttccaaatgggtgttggcggtgtagcaaaattcaatactatgcttaaagcaatggccgcaggcgattggaaaactgcatacaaatctgggcgtgattcgttatggttccaacagactaaaggacgtgcttcacgcgtaacaacaattattttaactggtaacatggaatcatacggtgttcctgttaaaacaccaccttcgcctggtgttggtgccgatttagttactagaaatacagatccagaagatccggctagtcctcctgttccattagattcacgtatcctttttaaagaaccggaatcaagttatcgtggtgaatacccgtatgttcatgctatggaaacagaaagcggacatatccaagagtttgacgacactccaggtaatgaacgttatcgcttagttcatccgacagggtcatatgaggaagtttctccatccggtcgtcgtactcgtaaaactgtagaagacctttttgacatcactaatggcgatgggaacttcttgatttctggtgataaacttgttaacgttggtgctaatgaaatatattataacatggcagaccgcctccatcaaatagatggcagcgacacaatctttattcgtggtaaccaaactaaaactgttgaaggcgatggaactctttacgttaagggcaatattaaaatagttgttgacggaaatgcagatattcttgttaaaggtgatgctaagactcaagttgaagggaatcatgactatactgtcaatggtaatgttaaatggactgtcaatggtaatgttgatatgactgttgctggcaattggtctgagacaatgactacaatgagctcaatagcttcaggacaatatactgttgacggatctcgtattgatattgggtaatatatggcacaaatacttcctttaaataccgacttaggagaagacatggaagggacgtctattgacgtcctttttactcctcagctagaaacgtccgaaactttagtgtcaataaatataacagattatgaaccgacacaaggcattacggtagatggtaatcgtttatatggaacatatgaaagtgtgtttagcttttcttcggatgcattgaaatatcgattaaatgatgattttaaaactgcatcttcatgggatgatttaccgaaagatgaatccgcacagttatatttgtggagagctcctcagaatcttcgtaaagtgtttagttatacggttgaaatgatttataactaccaagaagaaagttcatcaggcggcacaagaagtgactctggtgcagaacctccaccggctccagtacaaaaaactcttactaaggtttatacaaaaactatagtaggaaattggagcaaatgggcacaacaattacgaaactatgtttatatgaggccataaaaatgtctggcttaagttacgaccagtgcgttacaacaggtcatgaagcatggcctcctacggtaattaacgcttctcaatctaaagtattcaccggtggtattcctgttcttgtagcaggagaccaaataacacctcatacagaaattaaaaaaccatacgagactcatggaggtgttactgaacctcgtacatctaaagtatatgtcaccggtaaaaaggccgttcaaatggctgacccaatttcatgcggggatactgtttctcaggcctcgtcaaaagtctttatcaaataggaattaaaatggcaaacactcctgtaaattatcaattaacccgaacagcgaatgctattcccgagatttttatcgggggcacatttgccgaaatcaaacaaaacattatcgaatggctcaatggacagaacgaatttcttgattatgattttgaaggttcgcgtttaaacgtattgtgcgaccttttagcatataatactctttatatccaacagttcagtaatagtgcggtgtatgaaagctttatgcgcactgcaaacttgcgtagctctgttgtacaagcggctcaagataacggatacctgccttcatctaaatcggcagcacaaacagaaattatgctcacatgtacggatgcattaaatagaaactatatcactattccacgtggtactcgtttcctggcgtatgctaaaggtacttctgtaaatccatataactttgtttccacagaagacgtcattgtagttaaagacaaaaataatcaatatttcccacgtcttaggttagctcagggacgtattgttcgtactgaattaacatttgataaattaaaacctatcattattcgtgataagaacattgaccgtaatttggttaaattgtatgttgacggagcagaatggattaactggactcgcaaatcgatggttcatgctggttctacttcaaccatttattatatgcgagaaactgttgacgggaacactgaattttattttggtgaaggtgaaatctctattaacacatcagaaggtgctttaacatctaactacgttggcggccttaaacctgtccagggttctaaaatcgtaattgaatatatttctactaatggtgctgaagcaaatggtgcagtaggattctcttatgctgatacattagctaatatcacagttattggaattaatgaaaacccaagtaataaccctgacttcgttggtgcggatggcggtggcgaccctgaagatattgaacgtatccgtgaattaggtacaattaaacgcgaaactcaacaacgatgtgtgactgcgacagattacgacacattcgtctctgaacgatttggttctattattcaagcggttcagacatttacggattcatctaagcctgggtacgcatttattgctgctaaacctaagtctgggttatatttgacttccgtccaacgagacgatattaaaaattatcttaatgagtataacttagggacgataactcctgttgttatttctcctgattatttgtttattaaaatgaatattcgcgttacgtatgcattgaacaaattacaggaatctgaacaatggttagaaggccaaattattaataaaatcgaccggtattatattgaagacgtggaaatttttaactcgtcattcgcaaaatctaaaatgctaacgtatgtcgatgacgcagatatttctatcattggttcgtctgcgactattcaaatggttcgcgaggtacagaacttctacaaaacacctgaaacaggtattaaatacaataaccagattaaagatagaacattagaatctaacgtgttttcatttgatagtttacgcgttgaccctgaaacggaagatactattaaatatgacgttcgcattgtaggttcagatagaaatgaccgtggcattggacaagttattattggcccgtttgcagatggcgacgttatagaaaatgcttatattcaaccatatactggtgacgattttaataaacttcatgttacggacggaagaaacaaatattactctataggtgaagtaaattatccggctgattcaatttattggaatatagctaaaattgatttaacttccgatagatttgaagttcaaactattgaactctattcagacccagctgatgatgttatctttactaaagacgggtcattaattgtatttgaaaatgacttacgtccacaatatttaaccatagatttggagcctatttcacaatgacagtaaaagcgccagcagtcacgagtctcagattatctaaattgtccgcaaaccaagttcaaattcgctgggatgaggttggcgctaatttctactattttgtggaaatagctgagaccaaaacagctaatggggaagcaattccccgtaatagctatagatggactaatttaggatataccgctgataacaatttctttgagtctggtttaaattcattaacaacatatatgatgcgtgtggctacagcagcggagggatttgagcagtctgattggagatacaccgaagagtttgaaacatttgaaataaacgcttacacattccaacatatgattgaaatgcaattagctaacgagtttatttctgaaaaatttacaaaaaataatacaaactacgttgattttaataatgacactatcatggcagcactgatgagcgagtcgttccaatttagtcctgcatacaccgatgtgtcatcgattagaaattttataattggtgaaaatcggtatcatgaaatccaggggcatatccaggacgtatgtaaagatataaatcgagtatatctaatggaatctgaaggaattctttacctttttgaaagattccaacctattgtaaaagtgtctaatgataaaggccaaacatggaaagcggttaaattgcttaatgaccgtgtaggatatccactttcacgaactgtatattaccaatcagaatatacgacgtatttgctcggctatgataagattttttacgggcgtaaatcatccgatattcgttggtctgccgatgatgttcgtttcagttcacaagatgtaacatttgctaaaatcggggaccgattaaatttaggttttgatgtagagattttcggtacatacgcatcattaccaggaaacgtatcacgtattgcagaagctattacttgtaatgatgactatgtttatattgcggccagagataaagttcgcttcgttaaaaccagtaacgctcctattgattcagatccattatctccgacctattccgaacggttgtttgaacctgagacgtttacaataacaggcaaccctaaagcagtttgttataaaatggattctgttggtggaagaatattcgctcttattattggtgaagtcgaaaacgttaatgacgacccaagaacaaagcctattttagattccgttgataaaggtgtatacgttttagaccatgacgctggaacatttaaaaggatatttggtaataccgaagaagaacgccgtcgtatagaaccggctttcaccaatatgtctactgatggtgttgagctttatatctcttctagtaattttaaatttttagaatctgatattgttgacgacccagaaacgcaatctaagtatggacttttaggagcagttaagtatgaatatcctagagaatggctcgcagataaacattaccatatgatgattttcgcatcaaacgaagaaagtaattgggaaactttttcaccaactcctatgcagtattatgcagaacctttctttagttattctagaaaatcaggcacacgttcttggattaataactctgatagagcggtagtgatttattctgatttgctttacacaaaggtagtggaaagccaccctagcacttcacctgatcgtaaagttcatgaatactggaatgatggtgattgtaagattgttatgccgaatatagaattcactggatttaaaaaatacgcatctggtatgttgttttataaatcatcaggtgaaataatttcatattacgattttagttatcgtgttagagataacgtttctataatttggaagcccactaacgtatttttgaccgcctcattacaaaaccaagaaaaagaaacttcttgggttcctgttgaagagacaggtctagctgacccggatttacgcccattactcactacaatgatgccagagtcttatctgttggataatacaaactttgaagcattttgtgaagcgtatattcaatatctttctgatggatacgggactcattataataacttattgaatttgattaaaaataaatacccacgagaagaacacgcatgggaatatctttggtctgaaatttataaacggaacatttatttgaatgctgagaaacgtgatttagtttctaggttctttgagtccagaagttacgatttttattctactaaaggaactgaagcgtcgtataagtttttgtttaaagttctttataacgaagacgttgaagtggaaattgagtcatctgctggaacagagtacgatatcataattcaatctgattctataagtgaagatttggttggacaaactatatacaccgctacaggtagatgtaatgttacatatttagaaagaagctattctaaaggtaaattacaatggactgtgactattcataaccttttaggtaggcttttagtcggtcaagaagtaaaagccgaaagactagcagattttgaaggtgaaatagttcgcggtattaaaggtaaagaacttgcccaaaacactatcgattattttaatcgtggtagagcttattacgtcatgaaaataaagtcaaatcttccatcctctcgttggaaatctgacgtactacgttttgtacatccggtaggatttggatttattgcaataaccttattaacaatgtttattaatacaggattaacgcttaaacatgttgaaactattattaataaatataaaaattataagtgggattccggactgcctacggaatatgcagaccgcgtcgctcgtttagaccctcaaggtaatgtagaattcaatcctgttacaggtgaagtaatttatgatgctggtccttatgccggtatcgaataccctttacctgcaaattataatgaagaaaatgataactctattttccaaggacaattaccgtccgaacgacgcaagccaatgagcccattatttgatgcatcaggtacaacgttctctagatttagagagcttgttaatgaaagattgttagataacgtgggaaatcctagagacccgattaatccaccacaggttaaattagatgaatgattcaagtgttgtctatcgtgcgatagttacttcaaaatttagaactgaaaaaatgttgaatttttacaattcaataggtgatggtgataataaaaacaccatctttataacgtttggtcggtctgaaccatgggctgctaatgaaaatgaggtgggcttcgccccaccgtatccaacagactcggttttaggtgtaacagatatgtggactaacatgatgggtttagttaaagttatcccatctatgttagactcggttattcctagacgtgactggggagatattcgttatccggacccttatacattcaaaataaatgatatagtcgtatgtaatacagccccatataatgccactgaagtcggagctggatggttagtataccggtgcgtagatgttcctgatgtcgggatgtgttctattgagtctctcgacaacaaagaagaatgtcttaaattaggcggtaaatggacaccatctgttaggtctttaacccctcctgaaggccgtggagatgctgaagggattatcgaagttggcgatggatatatatgggagtatctttatgagattccacccgatgtgtctataaaccgatgtactaatgaatatatagtcgttccatggccagaagaagttaaagaagaccctgctcgttggggatatgaaaacaatctaacatggcaacaagatgattttggccttgtgtatagagttaaagcaaacataattcgttttaaagcctatttagactcagtttatttccctaatgcagcactgcctggtaataaaggatttagacaaatttctattatcacaaacccgttggaagctaaactccgtcctaatgaccctaatataaaagctgaaaaggattattatgaccccagagatttacagcgtcattctggtgaaatgatttatatggaaaaccgtccacctattattatggcaatggaccaaaccgaagagatcaatattttgtttatgttctaatttagggagacttcggtctccctttcgtgtataaatagtataaactattaaggattagccatatgtatattcaaactccaaaacaattgattgacgttggcgaaattggtaacgcttctacaggcgatatcctttttgacggcggtgttaaaataaacaatgatataaatgctatttacaatgcgtttggtgaccaacgaaaaatggcaactgctaatgggacaggaccaaatggacaaataatccatgctactggatactaccaaaaaggaggtcctactgattatttcacccctgttccagtaggaagtagacacgacatagatgcttccaccggtggtgttattgttactgttgctagaggtgaactcggtgattccgtggaatttataaattcaaacgggtcaatttcggtaaacaacccattaagtatccaagcattagattctattaaaggtgttgcaggtaatttagttataactacaccttatactaaagttactcttcgttgtatttcttctggtacaggcggttcaatatgggattattctacagaaagtatgtttagtcataccgaaattcctgtagacgggacatggaatattatttcagactatgtcaatattcctctattttataaaactgaatataatgctgctaaacttttggttacatgccaatctgccaacggcagaaaaattaaatcatgtgaaataaatattctaatagatacaattaattcaagagttatttcaaccgaatacgcagtgatgcgcgttggtaatgataacgaagaagatgaaattgcgaatattagtttttcgataattaacaattttgccactatgacagtttcttcacatataaatggtcttcgagtggcagctaaagttatttcaactcagaaaattagggtcgctcaataatgaaacaaaatattaaaattgggaacgtcgttgatgacggacaaggcgattaccttcgtcgtggtggtgcaaaaattaatgaaaactttgatgagttgtattatgaattaggcgatggcgaagttccatattccgctggtgcctggaaaacataccattcttcagatggacttaatttagctgctgaatggggtaaatcgtacgcaattgatacttcaacagggcgtgtttctataaatttacctaaaggaacagtggaagattataataaagtaattagagcccgtgatgtattcgccacatggaatattaaccctgtaacattaattgctgccagtggtgatactattaaaggttcttctagcccagtagaaatcaatgtgcagttttcagacttagaattagtttactgttctcctgggcgctgggaatacgttaaaaataaacaaatagacaaaattactagttctgatattagtagtgtagctcgtaaagaatttttagtcgaagttcaaggtcaaactgattttcttgatgtatttgggtctgtttcttataatgtgaataatatccgtgtaaaacatcgtggtaacgaattatactacggtgatgcgttcagtgacaatagtgactttggttctccaggagctaatcccggagaaatcgttgcattagatggtaaaaacatccgtttaagacaaccgtgtaatatcggcgacaccgtacaaattgaaacctttttggatgggattacacaattacgcagttcttattctcgccgccaaatacgtattttagattcgaaattaacaacccgtccttccttagaaggaagtgtatatgtcgctgatttgtcaactttgaaatctattcctttttcggcatttggagttaatccttcagaaccggtcaatactaattctttagaagttcgttttaatggtattcttcaagaattagctggtactgttggtttacctatgttcagatgtgaaggtgctgatgcagaaacttctaccgagtgttcagctttaggtgggacttgggttacatctaacacagattattctattgaatacgatgataacgatgcaactatcgcacgtgctttagtctttgaccgtaagtttgaagaccaagacattattgatattacatggtttaataacgatttaggcactttattaagtatcgatgacattttagatacaactgatgaaaggtatgtcgcacaaggtgcaaccgtaaatgtgacaggcgatgtggctttgaccgatttcaataatatcggatggcctaatgtagaacctgttccgacatatagcagggaattctcgtctattgcaaatatttttaacactatttaccctgtcggtactatttacgaaaatgcagtgaaccctaataacccagccacatatttaggatttggctcttggaaattatggggacaaggaaaagtattagttggatggaacgacgatattagcgatcctaattttgcattaaataataacgaccttgattctagcgggaatcctacacataccgccggtggaacagtcggaacaacgtctaacacactaactaattctgatttacctcctactcaaactgacgagaaagttcttatttccgatgagaacggtacaattattattggtggttgtcaatatgaccctgatgcggaaggtcctatatacaccaaataccgtgaaggccacgccacaacgaatagtacacacgtaccgcctcaagttgtaaataatattcaaccgtcaattaccgtataccgttgggtaaggattgcataatgaccatacttaatactaaagcgggagtaatatcccgcgaagcagattttttaggatttagaaaaaatcctactcaaattgatattttaaacaaccaaggcgtaggttctgtaactatttctcaattggcaaaaggattctacgatgataacgtagaatctgcaataaacgatgttcataatattgctagagcagatgtaggaacagttacaattaacacctcaggtgtatctcctgaaggaacttcacaggtagattattggtcctttagtggaagtgtaactgaccctagtttgcccgatggaagccctgttattgtaaaagtttacgggcttcctgttaatgctactgtaggtatgacagccgacgaatttgttgtacaattacgtactactctccggaatgcgatttccgaccaattggctattgcagagtataaagatgaccctactgttgggactaaattacaaataacatatttagataaccaaagacacgtactcccaacgtattcctcttatggtatcacggtttctcaagaaatagtgtctcaggctaagtccgggtacggcacttggaatttactaggtgcgcaaaccattactcttgacaaccatatttcacctacaaccttttattattttgtgagaaccgcatgagtaacaatacatatcaacacgtttcgaatgaatcggtatacgttgaatttgaccctaccgggtcaaattttgatagttcaataaccaatgtccaggcagccttagcctcaattagcgcgtatggtgttaaaggtgttcctgacgcaagcgaagcagaaaaaggtgtaattcaattagcgacagaacaagaagttcttgatggatttaatagtactaaagctgttacacccgccacattaaatgcaagacttcagtatccgaacgcgtcagaaacacaatacggtgtaactaaatatgcaacacaagaggaagccattgccggcactttagacactgtttctattactccgcttaaattaaaccaaactattgataacacgttctctactcgttattccaccgaaacaactaatggtgttattaaaattgcaactcaaaccgctgcacttgccgggtctgatgataccacagcaatgacaccgcttaaaactcagcaattagcaataaaattaatttctcaaatagctcctaataacgacccggcttcagaatctattaccggtgttgtgcgtttagctacggtggctcaaacacgtcaaggaactcttcgcgaaggatatgcaatttccccgtatacctttatgaattctgttgcatcacaagaatataaaggtgttatacgtctaggaacacaagcggaaattaatagtaatttaggagatgttgctgtaacaggtgaaacgctaaatggtagaggagctaccggttctatgcgtggagtcgtaaaattaacgacgcaggccggtgttgcacccgaaggcgatagctctggagcattagcatggaacgcagatgtaattaatacacgcggtgggcaaactattaatggttctttaaatttagaccatctcacagcaaatggaatttggtcacgtggcggaatgtggaaaaacggtgaccagccggttgcaacagagcgatatgcatctgaacgtgttcctgttggaacaattcaaatgttcgcaggtgatagcgctcctccaggttgggttttatgtcatggcgggaccatttctggagaccaatttccggactatcgaaatgtggttggaacgagatttggcggtgattggaataatcctggaattccagacatgcgcggtctttttgttagaggagctggtacaggcagccatattttaaataatcgcggtcaagacggctatggaaaggatagattaggtgtaggatgtgacggcatgcatgttggtggtgtccaagcacaacaaatgtcatatcataaacatgccggtggatggggcgaatataatcggcatgaggcgccgttcggagcatccgtatatcaaggttatttgggtactagaaaatactctgattgggataatgcatcatatttcacaaatgacggcttcgaattaggtggtcaccgcgacgcaacaggcactcttaaccgtgaaggacttatcggatatgagactcgtccatggaatatatctttaaattatattattaaagtccattactaagggtaaaaaaatgatcgaattaaaaagtctaccatacgttgatggccctcctgatgagggtcaaaaacgtttaaactggattaaaaattcagaagaaataactggagctgatacgttatacggttctgaaggagtaatgaaccgtccaataacagaagttcaacgaaatgtagaaacaattaacgataacgttaagactatcgcagaatctttagataccgctaatgctgatattgtcacaattaaaagtatcttggatgtttctggtgacgtagatgctttagcacaaattggacataacactgatgatattgaagtattaaaacacactgtaaattcacacggtgttgatattttaaacactgaagaaaaactagatgatactattgctaatatcggagtagttaatccagaaacagattcagtgtatcgtacggtgcgtaacgaccttctttggattaaaaccgaattagggcaatatactggacaagatattaatggtgtcccgaccgaaggtaatgaaagcaccgggatgaaacgacgtattattactaacagctcagtgttggttgaccaaggcgttcgtttaaccgagttagaaaataaatttgccgattctgatgttggggctctgacaaccgaagttgaaaacctccgtcaagaaataggtcctagaccatcgttaacagtaccggtttacactcgtttatccagtattgattcatccatttctatccaaactagagatattgcggcattaaaagattttgttggatatcctaattcaaccgctattaaaactcaagtcgaggccaatcgtctttctatatcaacaataaattcagacattaactcgcctggcggtattaaaccacgtttgacaacgttagaaactactataggctctccagatttaccaactactcttcagggtaagatcaaattaaataccgattccatttcaggtattaacacagttttaggtgttgattcttctagtggtttacgttttaacgtagcatggcttaatcaggtggttggcgttgattcaaacggtggacaacctgaaccggccggttcacttttatataggactcgtattcttgaaactggtgttactgacctaggcaataacattcaaaacgttcaaactgaattgggaactaattcgtctggtattaaaggacaagtaactagtttaaataaacttataagcggcaccaacccaaacggtcaaaccatagaagaacgtggtatattgccaacagttaaaaaccacgacacgacaattacggatttaactacgcgtgttaccactttagaaacagaccttgctgcagcagaagcagaaattcaggcccttaaagaggctggatatatcgaagatgctccttcagacggtaaattctatgttcgtaaagatggtgcttgggttgaacttcctacagcttaatgaaaagggccttcgggccctaaaggatttatatgtcaggttataatgcacaaaaccctaaagaattaaaggatgtaatattacgtcgtttaggcgctcctattgtaaatgttgaattaactacagaccaaatttatgattgtatttcacgagcgttagaactttacggcgaataccattttgacgggttgaataaaggtttccatgtattttttgttgatgacgaagaaaaataccgtcacggcgtatttgatatgcgtggttctaacgtatttgctgtaacaagaattataagaacaaatgttggctccattacttcaatggatggtaatgcaacttatccatggttcactgatttccttttaggaatggccggtgtttcaggtggtatgggtagtaattgtggtaaattctacggcccgaacgcttttggtgctgatctcgggtattattctcaattagtatcttatatgggtatgcttcaagatatgattgctcctcttccagatttttggtttaactctgcaaacgagcaattaaaagtaatgggtaactttagacagaaagatgtcattatcgttgaatcgtatgttcgctcttatatcgagacccataagatggtaggaaatacagtagggtacggtcaggtcggtcctcgtgattcatggtctatttctgaacgttatgataatccagaccataatttggtaggacgtcgagttggtgaagatcctgcaactaaacaaggcgcatataacaaccgctgggttaaagattatgcaactgcattagctaaagagcttaacggacaaattcttgctaaacatcaaggtatgatgttaccgggtggtgtcactgtcgacggtgttcgattaattgaagaagctcgtttagagaaagaagctttacgagaagagttatatttactagaccctcctgcaggtattttggtaggttaatatggcaacttatgataaaaatcttttcgccaagctagaaaatcgtggtgggtattctcagacaaatgagaccgaaatcctcaatccatttgtcaattttaataactatgagaatagtcagacattagccgatgttctagtggcagaaagcatacagatgcgcggtattgaatgtttttatgttccacgtgaatatgttgccgtggaccttatctttggtgaggaccttaaaaataaatttactaaagcatggaaatttgctgcatatctgaactcttttgaaggttatgaaggagcgaaatcgttcttcagcaacttcggaatgcaagttcaagacgaagttacattatctattaacccgggtctttttaaacaccaggtcaacaatcaggagcctaaggaaggtgatttaatatacttcccaatggataacagtttgtttgagattaactgggttgaaccatatgacccattctatcaagtaggtaaaaatgcgattcgtaaaattactgcaggcaagtttatttactctggcgaagaaatcaatccggtgcttcagaaaaatgaaggtatcaatatacctgaatttagtgacttggaacttaaccctgttagaaatcttgacggtatccatgacattaatatcgatgaatattctgaagttgagcaaatcaattcagaggcaagtgaatacgttgagccgtatgtagtagttaacaaccgcggtagacaaaattcaccgtttgacgatgggtttatgaattaataaatagataagataaagcaaacgccggtcgaaaggccggttaggagaaatgatgtttggttatttttacaactcgtcgttcaggcgatatatcacaatgatgggcgatttgttttcaaatatccaagttaaccgtcaattgtctacaggcaataaattaattagagttcctattacgtatgcatctaaagagcactttatgatgaaacttaataaatggacctctataaactcacaagaagatgtggctaaagtcgaaactattctaccacgtataaatctccaaatggtagatttcgtttataacccaacgtttaaaacgaatatattgaataactctcttttgagtaaatcgactaaggatattgtagaccaatacaacccatcaccaattaaaatgatttttgaactgagcatctttactcgttatgaagatgatatgttccaaatcgttgagcaaattattccatattttcagccgcattttaatacgactatgattgagcaatatgggcaggatattccatttgaaagggatattaaagtcgtatggatggcagcagcaatggacgaacaaatagacggtgataatttatctcgtcgacgcttagagtggtcattaacatttgaagtaaatggatggatgtatcctccggtaggcgcagctgaaggccttattaaaacgacttatcttgattttcatgctaatgaacgagaccttcaaacagccgccagtgtttttgaatcagttgatacagaaattaaaccgagagacgttgaagcacaagattggaatggcgaagttgaacaaacttatactcatgatattccaatcccgactccaccaacccctcctggtcctagaaaacaataagaggtaaatatggaaggtctagatattaataagcttttagatatctctgacctccctggaatatctggggaggaagtagaggtatatgctcctttacaattggtggaagttcagagtaatcctcaaaaccgcaccccggatttggaagatgactatagcgttgttcgtaagaatatgcacttccaacaacaaatgttaatggacgctgccaagatttttcttgagacggctaaaaatgccgattctcctcgtcacatggaagtatttgcaactcttatggggcaaatgactacgacgaacaaagaaatactgaagcttcataaagatatgaaagaaatcacatctgaacaggttggcactaaaagtgctgctccgtctagtcagatgaatatccaaaatgctacagtgttcatgggctctccaacagaattaatggaagaagtaggagatgcttacgaggctcaagaagctcgtgagaaggtgattaatggaacagccaattaacacattgaatgataatcacccgttaaatgaaggtgacaaagttgttattctaccacctcatttagctgaacgtaaagaagaagatggtatccattggattaaatcccaatgggacggtaaatggtatccggaaaaatttagtgattatctacgtataaacaaaatagttaaaattcctaataactcagataagcctgaattatttcaaacatacaaagataagaataataagcgtacacggtatatgggtttaccaaaccttaaaagagcaaatataaaaactcaatggacctatgaaatggtcgctgagtggaaaaaatgccgtgatgacatcgtatattttgctgagacatattgtgctattactcatatcgactacggtacaattaaagtacaacttcgtgactatcaacgtgatatgcttaaaataatgtcttctaagcgtatgactgtttgtaacttgtcgcgccagctaggcaaaacgactgtagtagctatttttcttgctcattttgtttgctttaacaaagataaagcagtaggtattcttgcgcataaaggctcaatgtcggcggaagtattagaccgtacaaaacaagcaattgaattactccctgattttttacaaccaggtattgttgaatggaacaaagggtctattcagttagacaacggttcctcaatcggtgcttacgcttcatcaccggacgcggttcgtggtaactcattcgctatgatttatattgatgagtgcgcgtttatcccaaacttcattgattcatggcttgctattcaacctgttatttcttcaggtcgtcgttcaaaaattattattacaaccacaccaaatggattaaatcacttttacgatatttggactgccgctgttgaaggtaaatcaggatttgaaccttatactgcaatttggaactcagttaaagaacgtctatacaacgatgaagatatttttgatgatggatggcagtggtctaaacagactatttcagcctcttcattatcacagtttcgacaagaacatactgcagctttcgaggggacgtcaggcacacttatttccggtatgaaattggctatattggattacattgaagttacacctgatagtcatggatttcaccagttcaaaaagcctgaggaaggacataaatatattgcgacgctagactgttctgaaggtcgtggtcaggactatcacgcaatgcatattattgatgttacgacagataaatgggaacaagttggtgttctacactctaatactatttcacaccttatactccctgatattgtgtttaaatatctaatggaatataatgaatgtccaatttatattgaattgaactcaacaggtgtttctgtcgctaaatcactttatatggaccttgaatatgaaaacgttatttgtgattcaatgaatgatttaggcatgaagcaaagccgtagaactaagcctgtaggttgctctacattaaaggaccttattgaaaaagacaagctcaaaataaaccatagggctactattcaagaattcagaacgtttagtgaaaagggtgtatcttgggcggctgaagaaggttaccatgacgacttagtgatgagccttgttattttcggatggttgacaacgcaacagaaatttgcagactatgcggataaagatgatatgcgtcttgcatcagaagtattctcaagagaattacaggatatgaatgacgactacgccccggttatatttgttgactgtgcaagtaacccagccgaatataatccatcagcacatggcctgtcaatggtataaataaaataaagcaaattaagaggaattaaaatgtcacttctctctccgggcgttgagctcaaagaaactaccgtacagagtactgtagttaataactccactggtactgctgccctggctggaaaattccaatggggacctgcattccagattaaacaaatcactgatgaagttgcattagttgatatgtttggtactcctaatacggatacagcagattatttcatgtctgctatgaacttccttcaatatggtaatgaccttcgcgttgtgcgtgcagttgatcgtgatactgctaagaactcatctcctgtagcaggcaatattgaattcacaatctctgctgctggtagtaactatgctgttggtgataaaattatcgttaagtatttgaccgaaactgttgaagcagatggttatgtcacttcagttgatgttgatggtaaaattcttaacatttatatcccaaccggtaaaattattgctcgtgcaaaagaaattaacgaatatccggcattgggttctaactggactgccgaagttgccagttcttcttctggactttctggcgttattacaattggttctatcgtaaccgattctggtattctgttaactgaagttgaaacttctgaagaagctattacttctctaactttccaagaatctattaaaaaatatggtgtcccaggtgtagttgctctttatcctggtgaacttggcgaccagctcgaaattgaaatcgtatctaaagcagactatgacaaaggtgcttcagcccagttaaaaatttatcctgatggtggtactcgtgcatctacggctaaagcaatctttgggtatggcccacaaactgatgaccaatatgcaattatcgttcgtcgtaacgatgctgtagtccagagtgtaattctttctactaaacgcggtgaacgcgatatttatggtagtaatatctttattgatgatttctttgctaaaggcgcaagcaattatattttcgctactgcacaaggttggccaaaaggtttctctggcgtaatcaaactgggtggtggcttatcatctaatgaaacggttgacgctggtgatttaatggaagcttgggatttgtttgccgaccgcgaatctgttaatgcgcagttgtttattgccggttcttgtgcaggtgaatctttagaagttgcttctacagttcagaaacatgttgtagcaattggtgattctcgccaagattgcttggttctttgctcaccgccacgtgcaactatagtcggtattcctgttaatcgtgcagttgataatctggttgattggcgtactgcgtcaggaacttacactgataataactttaatgtaagttctacttacgcggctattgacggtaactataaatatcaatacgacaaatataatgatgtgaatcgttgggttccattagccgctgatatcgctggtctttgtgctcgtacagacaatatttctcagccttggatgtctcctgccggttataaccgtggacaaattcttaacgttattaagcttgcaattgaaactcgccaaccacagcgtgatcgtttgtatcaggaagctattaaccctgttactggtaccggtggtgatgggtatgttctgtatggtgataaaactgctacttccgttccttcaccatttgaccgtattaacgttcgtcgtttgttcaatatggttaaaacgaacattggttcagcatctaaatatcgcctgtttgaattgaacaacgcatttacccgttcttctttccgtacagagacttctcaatatctacagggtattaaagctcttggtggtgtatataactttaaagttgtttgtgatactaccaataacacaccagcggttatcgaccgtaatgaatttgtagctactttctacttacaacctgcgagatcgataaattatattacgttgaactttgtagcaacagcaacgggtgccgatttcgacgaactaattggtgctgtaggtggttaataagacgcctgatgggctatttcggtagcccatataaatataactatatcgtttaaaaattaattctatgggcatctggttaatcctaagcccatattactacagaggctaatatgtttgtagatgacgtaactcgtgccttcgaatcaggtgatttcgctcgccctaacctgttcgaagtagaaatttcttatcttgggcaaaactttagcttccagtgtcgtgctacggctcttcctgctgcgatcgttgaaaaggttcctgtttcttatatgaaccgtaaaattaacgtggccggtgatcgtacattcgatgattggactattacagtaatgaacgatgatgctcatagcattcgtcagaaatttgttgattggcaaggtattgcagcaggacaaggtaatgaaattacgggtggtaaacctgctgaatataaaaagactgctatcgttcgtcaatttgctcgtgatgctaaaacggtcactaaagaagttgaaattgttggcttgtggcctactaacgtcggtgaagtatctcttgattgggattcgaataacgagattgaaacgttcgaagtaactcttgctcttgattggtgggaataatctggttggggagaaatccccagcttcccgtgatgacggagaagtccatataaatataactataattcccattcggagaatacaatgaaatttaatatcttaagtttgtttgctccatgggcaaaaatggacgaacgtgattacaaagaccaagaaaaagaaaatttagaatctatcaccacaccaaaattagacgacggtgctaaagaatacgaagtatctgaaaatgaagcacagcaaacatataatgctatgtttcagagaatgttcggtagtcaagaaccagggctcaaatcaacccgtgaattaatcgatacgtatcgaaatttgatgacgaactatgaagtggataatgcagtctctgaaatagtttctgatgctatcgtatatgaagatgatacagaagtcgtttctataaatttagacaacacaaaatttagtccaaatataaaatcaatgatgttggatgaatttaacgaagtgttgaatcatttatctttccaacgtaaaggttcagaccattttagacgttggtatgtagattctcgaattttcttccataaaattattgaccctaaacgccctaaagaaggtattaaagagcttcgtcgtttagacccacgtcaagttcaatatgtccgtgaagttattacaaccactgaagccggtgttaaaatagtcaagggttataaagaatatttcatttatgacacatcacacgaatcttatgcttgtgatggccgcatatatgaagctggcacaaaaataaaaatccctaaagccgcgattgtttatgcccattctggtttggttgattgttgtggtaaaaatatcatcggttatttgcatcgggctattaagccagcgaaccaattaaaacttcttgaagatgccgtcgtaatttatcgtattactcgtgctcctgatcgtcgtgtatggtacgttgatacaggtaatatgccttcaagaaaagcagcagaacatatgcagcatgttatgaatacgatgaaaaaccgtattgcatatgatgctactacaggcaagattaaaaaccagcagcatattatgtcgatgaccgaagattattggttacaacgacgtgatggtaaagcagtaacagaagttgacacattaccaggtgcagataataccggaaacatggaagatgtacgttggttccgtaatgcgctttatatggctttacgtattcctattacccgtattccaagtgaccaaggtggtatacagtttgatgctggtacttctattacacgagatgaattgtcatttggtaaatttattcgtgagctgcaacataaatttgaagagatattcctagacccgcttaaaactaatttaattcttaaaggaattattacagaagatgagtggaatgatgaaataaataatattaagataaaatttcatcgggatagttatttctcggaattaaaggatgctgagattctggagcgtcgcattaatatgcttcagatggccgaaccatttattggtaaatatatttctcacagaacagctatgaaagatattcttcagatgtctgacgaggaaattgaacaagaggctaagcaaattgaagaagagtcgaaagaggctcgtttccaagaccccgaccaagaacaagaggatttttaatggacgatttaattcaagctattaaatcaaacgacctcgttgctactcgaaagttttttgaaagtgcaatggcagaaaaagcggttcgtttgattgaagcacgcaaagcagaaatcgcttctcaatttttgattgaaggcgaagaacctgaagaagaaaagaaagctaaagcttcggaagacgacgctgatgaaggcgatgacgacgaagacgaagatgatgaggacgatgaataatgtatcttatccctgaatcttatgaattggtactcgaaaatgtcgaagcacttattcctgaagcacagggccgaatcgatgcattgtcttctgctctcgatattgacgatataaatactattatcgagaacatgcttgaaactgaaacggatttagctgttgcaatggcttccattattaatgaagaacagttaaatgagtttatcgttaaacatgtttcttctcgtggtgaagtcacccgcactaaagaccgtaaaactcgtgaacgtaacgcgttccaaaccactggtctttctaaagcaaaacgtagacaaatcgctcgtaaggtcgttaaagctaaaaaagctaacccttcaggccaagttaaaggcttgcgtaagcgtaaaaaggctcttaaacgtcgtaaagcattaggattaagctaatgaataaacccgagttacttattgaaacttggggtcaacccggtgagattattgatggcgttccaatgttggaatctcatgatggaaaagattctggcttaaaaccagggctttatatagaaggtatttttcttcaggcagaggttgttaaccgaaataaacgtttatatcctaaacgcgttttggaaaaagcagtaagtgactatattaaagaacaagtcgcaaccaaacaagcccttggagaattaaaccatccacctcgtgcaaatgttgaccctatgcaagccgctatcattattgaagatatgtggtggaaaggaaacgatgtatatggacgcgctagaattattgaaggcgaccatggtcccggtgataaattagctgctaatatacgagctggttggattccaggtgtttcctctcgtggtcttggttctttaaccgacaccaataaagggtaccgtatcgtgaacgaaggatttaaattaaccgtcggcgtagatgccgtatggggaccttctgctccagatgcttgggttactcctaaacaaatatcagaatcagaatcagaaaattcggtggaaatcaccaaaaacagtgctgacgaagcatttaaagctctcgcagagagtttaaaagcattataaataataatgtaatctaaaccacaggacactaaaatgatcaaagaacaacttttgaaagaagctcagaacatcgagacttcagttgctcttaatagtgttttcgaatcagtagaactgtctccggacgttaaagctaatttcagcactgtattcgaagccaccgttaagcaggaagcagtcaaactggctgaatctcatatcaaagccatcgccgaaaaggctgaagaagaagttgaaaaggccaaagaagatgctgaagagaaagctgataaaaaattggctgaacaagcttctaaattcctagaccatcttgcaaaagaatggctcgcagaaaaccaaatcgcagttgataaaggcattaaagctgatttgttcgaatccatgcttggtggtctgaaagaactgtttgttgaacataacgttgttgttccagaagaatctgtagatgttgtagcagaaatggaagaagagctggccgaacataaagaagaaaccgctcgtttgttcgaagaagttaccaaacgtgatgcatatatcaattacgttcagcgtgaaaccgctattaatgaaagcgtaaaagacctgactgaatctcagaaagaaaaagttattggcctggttgaaggtatggattattctgacgcatttggtactaagttaactgctattgtagaaatggttaaaggttctactaaagaagaagccgctattaccgaaagtataaatacagttgacaatgacgctgccggtcttaattttgttgccgaagcagttgacactaccacaactcaggtagaacagaattctaatgtaagtttatatgcgaaagtcgcatctcgtttctaatttaaaggttaacacaaatgactactatcaaaactaaagctcagctcgtagacaaatggaaagaactgctggaaggtgaaggcctgccggaaatcgctaatagcaagcaggctattatcgctaaaatcttcgaaaaccaggaaaaagatttcgaagtatcccctgaatataaagacgagaaaatcgctcaggcatttggttctttcttgaccgaagctgaaattggtggtgaccacggttataatgctcagaatattgcagcaggtcaaacctctggtgcagtaacccaaattgggccggcagttatgggtatggttcgtcgtgctattcctaatctgatcgcttttgatatttgtggtgttcagcctatgaacagcccgaccggtcaggtatttgctctccgtgcagtatatggtaaagaccctatcgctgctggcgctaaagaagctttccatccgatgtatgccccagacgcgatgttctctggtcagggtgctgctaagaaattcccagctctggctgctgacactaccaccgttgtaggtgatatctatactcacttcttccaagaaactggtactgtatatctgcaagcttctgctatcgtaacacttgattctggtgcaactgatgcagctaaattagatgcagaagttaagaaacaaatggaagctggtgcactggtagaaatcgctgaaggtatggctacttctatcgctgaactccaggaaggtttcaacggttctaccgataacccatggaatgaaatgggcttccgtatcgataaacaagttatcgaagctaaatctcgccagctgaaagctgcttactctatcgaattagcacaagacctccgtgcagtacacggtatggatgctgatgctgaactgagcggtattctggctacggaaattatgctagaaatcaaccgtgaagttgttgattggattaactactctgcacaggttggtaaatctggtatgaccctgactccgggttctaaagccggtgtatttgacttccaggacccgattgatatccgtggtgctcgttgggccggtgaaagctttaaatctctgttgttccagattgataaagaagcagttgaaattgctcgtcaaaccggtcgtggtgaaggtaacttcattatcgcttcccgtaacgtagttaacgtactggcttcagttgatactggtatttcttacgctgcacagggtctggcttctgggtttaataccgacactactaagtctgtatttgccggtgtacttggtggtaaataccgcgtatacatcgaccagtatgctaaacaggattacttcaccgttggttacaaaggcgctaacgaaatggatgcaggtatttactatgctccttacgttgcacttaccccactgcgtggttccgatcctaagaacttccagccggtaatgggctttaaaactcgttacggtatcggtgttaacccgtttgctgaaagttccctgcaggctccaggtgctcgcatccagtccggtatgccgtctatcctgaacagccttggtaagaacgcttacttccgccgtgtatatgtaaaaggcatctaatcttaattgattaaatcttattttgggagacttcggtctcccatttttggttttatttctgtgcaatttcgatgtaagttttcaaaatattttgccaattaggcataccttcttggacatatgccggagaaccgtctttgtttttgaatgatgcaagtttatcagtggcccaataacctttagctcgagcttcagaatcaactttcatccatactttgttgaaggcattaccattaacttttgcaccatatttttctactaacttaactgcttcagcttctagaacttttaaagtatctcgtaagaaacgtgctttagtcattttgtttactcctctgtagttgataagtctatagtatcacacgccaaatacgttgtaaacaatctttataaataatctatatcacataaggaaaaaatgcaatgagtaaaatccaaaaattattgcgtgaatctacaacgtctactagcaactcaatcggtcgcccaaatctcgttgctttgactcgcgctacgactaaattaatatattctgacattgtagcaacacaaagaactaatcaacctgttgctgctttttatggtatcaaatatcttaacccagataacgaattcacatttaaaactggtgctacttatgcaggcgaagctggatatgtagaccgagaaaaaattactgagctcacagaagaatcaaaagtcacactaaataaaggtgattttttcaaatataataatatcgtctataaggtgttagaagatacaccatttgcagatattcaagaaagtgatctagaattagctcttcagattgcagtcgttcatttaaaggtacggttattttcagatgcagcggtaacaagcaaatttgaaagctctgatagcgaaatttctgatgcaagattccagattaataaatggcaaacttcagtcaaatctcgtaaacttaaaaccggcctcacggttgaattagcgcaagatttggaagcgaatggatttgatgcccctaacttcttagaagatttgcttgctactgaaatggctgatgaaattaataaagatattcttcagtctttaattactgtatcgaaacgttataaagttactggaattactgacaccggatttattgacttgagttatgcatcagctccagaagcaggtcgttcattatatcgaatggtgtgtgaaatggtatcacacattcaaaaagagacaacttatactgcaacgttttgtgtagcctcagctcgtgcagctgctattcttgctgcttccggttggttaaaacataagccagaagatgacaagtatctttcacaaaatgcttatggattcttggcaaatggattacctctttactgcgataccaacagcccgttagattatgttattgtgggtgttgtagaaaatctcggcgaaaaagagattgtaggttccatcttttatgctccatacactgaaggaatggatttagacgacccggaacatgtcggtgcatttaaagttgtagttgatccggaaagcttacaaccgtctataggtttattggttagatatgctttatcagcaaatccttacacagtagcaaaagatgaaaaagaagcgagagtaattgatggcggggacatggataaaatggcaggacgttcagacttgtctgttttactcggtgttaaattgcctaaaattattatagatgaataaacgaaaaagggaccgtaaggtcccttttttttttgttatgatactaattcaatccatgcaggacgcagaacatcttgcaccattcggactaattctttcttaacaagattcggattatcagatgatgttaatacaataccttcacgagaagtttcttccagaatatcttggacagtcaatcccatcactttgccaaaatcttttggcgttacagtcccaatcttagaaataacattattaacacgatttaatgtaacataacaagctagaacatcaagcaagtttttgtcaacttcggttaatggaacctgagttttaataggcttatcagactttttcttttcactgaatttagagttcttgcacttaatcgctacacgagcaccgtttggcagccatttagggaaacaaggcttcagaacataaccttctgccgtattatcgccaataacattagcatcaaatacacaattatttgcttctacaaggtcttctgacgcagtagcattataagcggctaagacggaatcaaggtcatttggaatcatgataagagaatcaaatgttccacgtccaagcattggtgccattttaaaaccgaattcattacagaaatcttgcatttcgtaatcactcatgtaataagtatcagcactttctgtgtttatgatgatatcgaatacatagaaatctttttcaccatagtcaacacctttctggattccaccaccagcgaattcaccaaagacttgatatgacaccggcactgaagttgaaatactgtccatgacttcttgaacggctttaatagctttatcatacttcttgagtacgatttcataaccataaaaatcttctgctagaagaatagggcctgtgcgcttggcgcatgtgacgttgtcacgttcaattattaacgagaagttggtcccatggattttctcacgtgctacccaaacaccagtagtcaaaccattagtgtagagtttttcaataaacttagagttgtagtggttttcaagactgctgtatttcttaaacataaatcaccattataaataataatatcaaaataattagcagagactctgtctctgaccagatgtttaatttgaatggatagaacctagattcattataccatcaaaaaatgtaaagcatattagaacttgatttctatccaatgaccatcacgctggtcgtgattaattttgtactgaaagccgttatcacgaagccattgaccgacttgctcggtgatagttaaatcattctttgacgggtagtacgtgaattgtgtctggcctttgtcagcggctttctctgccatcacagagaagttagtaataaaatcactcaacaaattggctttagtggccagagccctttctcttaattcctgtgcaaaactcatttcttcacctttttattaatcagacgtttacggtatacaactttttcttttgctttaaactttgaccgagctgtctcggctttagtccatagtaatccaacttctttaggttgtaaaccgattttttgagcaatttctacgaatgaaaatcccgcctcatgtaatgtataaacttcaacttcagctctcataatcaatcccgtattatttggtttgtgccattatatacatcaatctcaagttgtgtttttatgctttaaaaacgaagaaaggggccgaagcccctttcgattatggatatgtatagatgataccagtttccaaagcagttttatggacgatgtatccattacgtgattcttgaacatcaacttctgggtagtctttcatcatcttctgaagcgtataacgatgcaggtagtatttactatctggatcttcagttttccaatctttaccttcttcagtcattttttggatttcatccataacccaccaaccgcaccagatgtaagctgaggtacgatgtggaagaggatgaacataaggtaattcaccttctggttccggagcaactttatcagtcacttgaacttgaccttctgctgtaatagttttgctatcataatcagcagcagtaacagttgcagtcacttcaatagtttgacttccaacagatgaagtatcaacggtatatacattagtcgacccttctacaggagaagaatctttcttccatgaatacgcaatttgcgcttcttctggagcatcagtgacattagcggtaaatgtagccgaagcatcttgttgaacgttaatagaaggaggagtcaatgtaacctgtggattcattgtcttcttattaactgttaatgatacttcattagaagtaacttcctttgcatcataatctgttgcggttacttgggctacacacttgatctttttaactccgcttgtggtaggagtgtaattgaatgtagcgctagtcgcttcgcttacaggagaatcgtcaacataccattgatacgtagcagatgcacctgatggctgcgaagccaaagcagcagtaaatttaacagctgttccaattactccagctgaaggactattgggagttactgccaacgtagttgactgagttttatttttaaccgtgatagtcgtagtaatttctgctgtttcagcatcagtatctgggactgtgtttgttgcaactactttaatagtcttttgtccagcaggaccctttaatacataactaaaagttgcttcagctccatcttgtggagcatcgtctacagtccaagcataagtaatagttccacctccagtttcaccactgggcgtagcagtaaactgcttagtctgatctataactccagtaggcgttttaggagttatatcaactgtaaaagccataagttatccttattttaatgttacgaaagaagaattacgagtttcacgaattagaactgatccatcgcgattaatataataaattaagctaaataatgtttggtgtgcagacgcatgttcaaaactggttgggcgagatttccaatcaggtgtttcggctatccattgataaatccaccaaggaacagtaacataccctgggcctttgcctaatttaatgagtgtaggactaaaattttcaggcagaacaaattttacttctttatttacttctggcttgggctctttttcagattcaacaacctgagtaattgcttcttcaaatttatcatggtcgaattctatttcttgttcgacaacttctaatacttcaacttgttctgttggagaatcaaacaacagaatagcttcttctttaacttcttcgttggtgaaattaacaccgtctacatcatctgcggcagtaattaaatcagtgatagataatccatcagtttcaggtaacggttcatcagccagttcgttaagagcttcttcgatatcaataacaatattatcgaatgattttgttttcttaacactaatgccaaattgttccgcatattcagacagtttagctttggcttcctttttatcagaaagagcacgtaactcttcaatatagtctttatcgatcatggtatttcctcattataaatataactatatttattacatggtaatttgacatgactgacattaaagtacattttcatgattttagtcacgtgcgcattgaatgcgacgaaagtacgttttacgaacttcgtgacttttttagctttgaagctgacgggtataaatttaacccaaaatatcgctatgggcaatgggatggtagaattcgacttttagattacaatcgtttgttaccatatggacttgtaggtcaaataaaaaagttctgtaacaatatgagttattctgtatggattgaccctaaaatctttgagactgaagaccttaccagagaagattttgacgcatggctttctaaacaagaaatttattcgggcaacaccaaaatcgaaccacattggtatcaaaaagatgcagtatatgaaggactagttaatcgtcgtcgaattttaaaccttccgacatcagcaggtaaatcactaatccaagcacttttagctcgatattatctagagaactatgaaggtaaaattctcattatcgtccctacaacagcattgacaacccagatggctaatgattttgttgattatcgcttgtttagtcattcgatgattaagaaaattggcggtggtgctgataaagccgacaaatctaaaaacgacgctccaattattgttggcacatggcaaacggtagttaagcagcctaaagaatggttctctcagttcggtatgatgatgaacgatgaatgccacttagcaacaggcaaaagtatttcttcaatcatctcaggattaaataattgcatgtttaaattcggtttatctggctcattaagagacggaaaagccaatgtaatgcagtacgtaggtatgttcggcgaaatcttccgtcctgttagcacgtctaaattaatggaagacggacaggtaactgagcttaagattaatagtattttccttcgttatccggacgaattcaccgttaaattaaaaggtaaaacataccaagaagaagttaaaattattaccggactaaaacgacgtacaaagtggattgctcaactttcagtcaaattggctaagaaagacgagaacgcatttgtaatgtttaaacacgttacacacggtaaagaaatatttgaagctattaaagagcttggatacgaaaaagtttattacgtatcaggcgaagttgatactgaaacacgtaacgcgcttaaagtcatggcagaaaatggtaaaggcattattattgtcgcatcatatggagtattctctactggtatttcagtcaagaatcttcatcatgttatttttgcccatggtgttaaatcaaaaattatcgtacttcaaaccgtaggtcgcgtgcttcgtaagcatggttctaaagctgttgctacagtttgggatctcatcgatgacgcaggtgtaaaacctaaatcattaaatactaaaaagaagtatactcatcttaattacttgttaaaacacggtattgatcgtatccaacgttacgctgatgagaaatttaactatgtaatgaaaacaattaatttataagggcttcggcccttaggagataaaaatggtacttgaatttaaacaatttttatacgaagcatctattgacgaattcatgggtaaaattgctagttgtcataccttagaagggcttgaagaattggaagcttattataagaaacgtataaaagaaacggaattaaaagatacagatgatatttctgtcagggatgccttagcaggtaagcgtgccgaacttgaaggcgacgatgatgaggatgaggaagaagacttctaattaaaaaaaaaggcccgacctttttggaagggccaaaaaccataggcaaaaaaaggtaacactatagtaaaagttgggtttcgttcaattgctcttctgaactttctgaaaccggcaattgttggacataattataacaaggaccaggatgtgctggacctttgtctgtttcaacaaccaatgcagaatcgattggagttttacagacaacacaaatcttatctgacatgattgcctcctaagttgaaattacatatctatttataccactcgcatgcacatatcgatacccatatcttttgtataaaaatactcgtcgatatacccagcaaacttccctttaatataaaggacgtcttcgccgcaaggatggtctgccaggatacgaatatcctgacgtcgtagacgatacttttccattaagaatttaatttcggtttcaaattcttcatcattattaaaggcatcttcaattgaataacgcattattgccccgcttcaaattctcgcatatcttgaatatgtttaagtgcaaaactacgagacttaactgcgtcaagtgccccactacagaactcaagtaaaattccccagtattgtaaagtagtctctattttaagcacatctttatctgcagccaggacagttttcatttcagatttctcatatcggtccatactgaattcatcaccatcacctcgtcccgagtagtagtctaatcttgcttttagagcagttttcttctgagtctctatacgcaacatttctttacgaataaatgagtgcttacgtagccatttgctgtataacttaacattattcgccgtctcatattgcaactttgtcgtatcaatagctaagtctgcgtctaactcttcctgtaaatcttccagcttcataatgttctctcttttaactaataatctcccggctgtatcggaaggacctaaaaccattatacataggttgccttgaagcattacactctattgcttgacgctaactgaagtttaatttgttcaatatcgtcagggttgtctacgaccgaaaatctaatctctactataaccgtatagtcatcatatactggcgttacacttacagaaagtttgtcgatgcgtggctcatagttacgaacagctgcctggatattacgctcaatcgtatcggctgtaagtggtgtcatgttctcgaaaagttcatcaaccaaatcgcatccaaattcagggtcgaaggggcgtgagccttttctagttgtcactatgccaagaagactatttttaatagaacgaagtcctacagaacgagcaacgtccttgttccaatccatacgcatttctgggtcgatatctgaataaagtttattgatattagacattatagtaactcaaagaattctttgaggcctcgtattgtgtgaacgtgtgacgccccacatttgggacatttaataggggttgccagataaattgatggcgacaccaaaagatttttaatattgatcatgtcatcttctgttataaggccgtaaaggtcgtttatttctgcttcagttaaatcttcaacagggatagactctccattgacaaaaacagcctcaatacatgaagcaatcattaatgcgatatttttatcatcaaataatttaggttgacggaacttaattttaataccgctgaacgaataccagggatcggcctgttcatctaattgagtgtgcaataaattcatatagacttgaaatgaatgcccacaggaacaattccaggtgtgttcttgattcacttcacctaatgaatgtgcccacagatttaccaacaatagctcggcttcttgtttagtcaagtttttagcattagagcaattagtgataatattgttcactgctgattcaatagtaccagtagcccgagcacctatgagccctaaatattcttttaaagtaaaggccctacaattcacttctttatcgcctaaacgtacggtaaacgtatatttgtacatgttaactcctttattgtgtatttataaataatagaaaaggagtaattatggctaatataattcgttgtaaattaccggatggtgttcatcgttttaagccgttcactgtggcggattatagagactttttactagttagaaatgatatcgaacatcgttcgccgcaagaacaaaaagaaataattgccgatctgattgatgattattttggcgagtaccctaaaacatggcaaccatttatattcctgcaagtttttgcaggatctataggcaaaacaaaagttcccgttattttcacttgccctaaatgctctaaagaaaaaactgcaccatttgagatatatcaaaaagaactagtcgaacctgaacttgatgttgctggtataaaaatacgtttttctttccctgaaaagttttatgacaataaagcattaatgataagtgaaaacataaaagaaatatattataatgatgaatggtacccatggaatgatttgactgaagagaaccaaatccaagtaatagaagcaatagacattgactcgctcgagaaggttattgcttctatgaaccctattaatttgacccttagattaggttgttgtgaacgacatgttaaaacatatactgatatcttagaggtttttaaattgttagttaaccctgatgagatttttacattctatcagataaaccattcactagtaaagagtcaatacacattggattctattatgcaaatgattcctgttgaacgtggtattgctttaacattagtagaaaaggaccataaaaaatgacagtattccaacgtccaggatatcctaacttaagcgttaaattataccaagattattcggcttggcaagaaaatagatacgttgaactcgcagcaacaataacaactttaaccatgcgagattcgctatatggaagaaatgaagggattcttcaattttatgacactaaaaacatccacactaaaatggatggtagacagatagttcaaatctctgtttcaaattcaaacacacctctccaagttagaactcgaatttacggatgtagacattattctgtgtctgtggactcaaaaggcgacaatattattgcaattgagcttggaacaatacattctatagagaaccttaaatttgggcgaccgttcttcccggacgcaggagaatctatacgtgaaatgttaggtgtcatatacaaagaccgtacgttaattactccgccaataaacactattaatgcttatgttcctgatattccttggacaagcacatttgatgattatttggcatatgtcagagaattaggacttgctacagcgagtgataagttcgtattcgtatggcaagatattttaggcgtaaacatgattgactacgatactcttattggccaggaaggcattaagatgattgtaggcgagccaaataccgtaggccagtatattcaagagcttgagtatccattagtatgggatttcacctggatgactaaagctaaccaatttacaagagaccctattaaaaacgccacaatattcgcccattcatttttagatacatctattccggttattgttacaggtgatggtgataatgctattcttgtgtcaagatccggcggatattccgaaatgacctatcgtaatggatttgaagaagcaagtcgtcttcagacaatggctcaatacgacggttatgctaaatgcactactacaggtaattttaacataacgcctgctactaaaattatatttgttgaccaaaagaaccaattcaaatccgaattttacgtggatgaagttattcatgagttatcaaataacaactcacaaactcatctgtacatgtttaccaactcaatggtgttagaacctgttaacccagttaaggttaaaaatgaacttaaatctgattctacctctaaagaaaataattctaccacagtctaataaaaaggtaatgattcccaaattagggctcaaacattataatcttttaaaggacgttaaaggtcctgatgaaaacatgaaaatcttagctgattctatttgtaaaaatatgagtcccgcagattttgattttgcatgtctacatatattggaatttaataacaaacttaagtctgaagttgaaaaagacggattcacatataaactagatgacgtctatgtatgccaacgaacagaattccaattccaaggcaatactttttattttagacctccaggcaaatttgaacaattcgctacaatcagtgaaatgttatcaaattgcttaataaaagttaatgacgaagagaaagaaatttctttccttgagatgcctgcttttgtaatcaaatgggcagaagacctttcgacaactattgctattccaggccctaatggtcctattaagggtatagcagaaattattggattgcttgaatgaaacctgaagaaatgaaatccatgcgtagaaataaggtcattgccgataataaaccacaaaaagtagctgctgatgcagctaccgattcattagaagcattgaataacatttcatcaaaactagacgatgtccaagccgcgtctgaactcacatcacaaagtgtagaagataaaggcaatggaattattgaatcaattggagacttaaagaattcgacagataatactgctgaaggcacagagcttatcgcagaagttattgaaaaacaaactgaagtcactaaaagtataaacgaagtttctagtgcaataagctctaagttagaccgattagctacattattagagcaaaaattacaaacatctaccgctattcaaaatacaggaggcacctctcttgaagtaattgagaacgcaatacctgttaaagtggttgagaatgaaacttctgatgagttgtttaaagcattacctacacctgaaaagattgataataagccagacgaagatttcttcccagcgccggttcaagaaagtgctaattctacttccgattctaaaggtggaattagctttaaattgagcgataaaattgcaatgctcaccaaaacagttcaaaccgggtttaataaatcaatatcaatttcagacagaattgctggaatgcttttcaaatacactataacagctgctattgaagcagcaaaaatggccgcacttattcttggtattgttatcggtattgatttattgatagtccatttcaaatattggacagacaagttcacttctgcctgggatttatttgatgaaaactttactaaattctccgatgaagctaaagagtggggtaaattcttaagtgatatattcacttctattgactcgataaaacaattgtgggaagctggagactggggtggtttaaccgttgctattgtcaaaggtgtaggaacagcattaatgaacttaggtgaactaattcaattaggaatggctaaactctccgcgtctatattgcgtgctataggttttggtgataccgcggacgaaatagaaggacgtgctttggaaggattccaagaaactactgggaacaaattaaagaaagaagaccaagagaaagtcgctaaatataaaatgaagcgtgacgatggggaattaggaaccgtttctaaaggtcttgatatgttacaacgcggcaaaacattcgttactaactgggttcgtggtaatgacaataaagaagagtttagtacaagtgatgagcgcgctgcggaatcagcaaaattaaaagagttacctgaagaggagcgtaaagaggcgtatataaaagctaatgaaactcgtgcggcactggttagatttgaggattatatcgataaaatcgatatgactaatccggaaaatgctaaaaacgtcgagaagtcttatgctgatttaagtaaacttattaaagaccctgaacttaataaaactcctgttgttaaaaaggaaatagatgctagatttgaaaagctaaataataaaatggctgaagtcaaaaaggctcagacaacagttaagcctgaatcttcgactaaatctccggaagcaaaacaagttcagtcaatagagaaaggacgtgcttctgaatctaaacaacagcaaccggtagcggcgattagtaacacaaataatgtcgtcaaaaagaataccgtagtccagaatatgacccctgtaacaagtacaacggctcctggaattttccatgccaccggtgttaattaaggattattatgattagtgtaaaagaaatagtagtagatgcaaaggatttaaataaagcaatcccagtctcagaaagtgctgggcaaagcactaaaaccgaaacaactactaaaacttatgttgctcaatttcctacaggaagagcagccggaaatgactccacaggagacttccaggtaacagacctttataagaatggattattatttaccgcgtacaatatgtctgcacgcgattcaggatccctcaggaatttacgtccggcatacgccggaacttcatctaatggtatcatatcagatttaactgataacgtgaaagatgcagtgactaaattctcaaacggattgcttcctgccggagctaataagtctactataaataaaactcctgttgctaatatacttttgccacgttccaaatctgacgttgatacaacttcgcatcgttttaatgatatcggtgatagccttattactaaaggtggaggtactgctacaggtgttttaagtaacattgcttccactgcagtctttggtgcattagattctattactcaagggcttatggccgataataacgaacagatttatacgacttctcgtagtatgtatggcggtgctgagaaccgtactaaagtctttacatgggatttaactccacgttcaactgaagaccttatggctattataaacatttaccagtattttaactatttctcatatggtgagaccggtaaatcacagtacgcccaagagattaaaagttatttagacgaatggtaccgttcaacgtttattgagcctatgacaccagatgatgcggtaaaaaataagacattgtttgaaaagattactgcgtcattaacaaacgtattagttgtaagcaaccctacaatttggatggttaaaaactttggttatacatctaaatttgacgggttaactgatgtatttggcccatgtcaaattcaaagtgtacgttttgataaaactccaaatggacaatttaatggtctcgctgttgctcctaacttaccgtcaacatttacgttagagataacaatgcgagaaattattacattaaaccgttcttcactttatgcggggactttctaatgtactctttagaagaatttaataaccaagctataaatgcagatttccaacgaaacaatatgtttagttgtgtatttgctactacgccatcgaccaaatcatcttcactaatttcgtcaattggtagttttgcttataataacttagggttggattctgattggttaggattgtctcaaggtgatatcaatcagggcgtaacaaccctgattacagcaggaacacagaaattaattcgaaaatcaggtataagtaaatatctgattggagcaatgagtcaacgtacggtacaaagcttgttaggtgagttcacagtaggagcttatctgatagacttcttcaatatggcatataataatacaggtttaatgatttattctgtaaaaatgcctgagaaccgattatcttatgaaacggatttcaactataactcaccgaacatccgaattaccggccgagaaatggacccattagtaataagctttagaatggattccgaagcatctaactttagagcaatgcaagactgggtaaactcagtccaagaccctgtaacaggtcttcgcgctttaccacaagacgtcgaagcagatattcaggttaatttacatgcgcgaaatggtttaccacataccgctgtcatgttcactggttgtattcctgttagtgtctcttctcctgagttaacgtatgatggtgataatcaaataacagtttttgatgtaacatttgcttatcgcgttatgcaatcaggtgctgtaaatagacaggctgctttagaatggttggaatcaggacttattagtagtgtttcaggaatgtttggaaataatcagaatgattctggtctaggaagtgcagtatcaagactttctagattaggtgggactgctggaggtgtgtctaatataaacacattgacaggtgtggtgaattctgcgtcaagagttttaggactataagaaaaagggagacgttgtctccctttaggggtttatttacggaatgaaaggaatgctggtgctcggaatggagtatcatctttagagtatttaactaatacgaccattggtacctctgtttctaaatgacctgtcactacaccgacaaaaatttgatcagtgtgctcagggtcgcgaaagtttttaagaggttccatagcaatatggaatgcacctgggaatactcgattcaattcttcaatcacagcttcgttaaaaacatcatctgccgggataacatcttcaactactagttcttgaccattaaagcgaagcatagatttcataacgttttcctcatgttgttgattggatgatagtatcacacatccatgtgtttgtaaactatccttggacaaatttaaacggaactgattctaaatccattaaagatgctaacaatttcaaacctttaggtgcactagttttttctacaaatgaggagaacgataccggctcatccgattcgatttcacccgtcatagcaaccacctcgcctgtttccatgagaacatcaccatcgtaaatgacggcttcatccaactggtctgaggacatgacttcagcttgaataaatttaaggttggattctaaacctgcaccggtgtcagatgacgcatctgtaattttatttatctgcaagagaatgcctctaggcaaaataatttcttgctcattagggtgattactcaactgtcctggataaatcacgttaactttatgggcaccgtcaatagcccatccaacgttaacacggatttgttctggcgcatgcatagctgttcttacttgactaggagaaatagtaacaccttcgtcattattgtcaatgttaagctctttgcgaacttcttcaggagcaagtccaagggcaacgttctctttaaacccaccgaaaataataggagctagtgaagtggaaacatagtttctgaagtagaatactttatttttaaccattgcttcgtaaataggcattctgatagactgagctctatataacgttagtccttcaggtaaacggtctccatttaaaaacgccgaatcaagaccatcaatagcgcgtttaacttcatcttcatctgcaacatcgtaaaaatctggtttataacgacctaacaacatattattgatatctatatatgcagaagaggcatattcacgaatagctcgtttttcagcaacagagtattgtttagggtcccgattcattgttatattaaaggtgcctctagccgattctcgtgcataagtatacatcacattagacaagaacgctgatttacgttgtttccaagttctttcagatacttcagctaaaacgtcgtcaggcagttggaaattatcacgtctaaaatcttcaaaccattcgtctttaatagagtctgcaatttcatttgcagcttcaacaaaagcagctaatgctttaacagatgttgttttttcggttttaattttcttagcaaacttttctaaagtcggcttaataacactaccataagaaacttcatcagcaaatttaaaggattcatcaatacgattataaatcttattttcgatatcagcaactaaagtgccttttgctgtggacgatgcttgggctagtacgatttcatatgcttcaggaagtaattcggccgtagctgggccactaacttctttagcagaattttcgtatttctggaataactcaccttcttgtcggtcagcttctaaagattgacttgctgcaatagcacgacgagaaattttagtacgagcaataacaggcttatctttacgtttttcttctacagcagcaatagaaccagcgatagccgtttctttggtgaccttttcgccggtctttttactcacataaacttcgccaacatcagaatctactttcgtatacaactctgtgttaatgttagggatgcctttaatatcttcaatgttggcatttttacgaaccatcatcacataggtgtgtttacctgtgaattgatacattgccgacaatactttaaaacgaccaccggttttagtagaaactaaacgagcaagaagagtttgaagctgttgtccacgtcctttcaatttcttggtagggaatcggaacagaactgcatccatacgaagagctttaacctgttcatatactgtattgaaaatagtgttgattgcatcaataggagcaggaccaaggccatttttcaattcagcgagattacccttttcagatagactcataataacaacatgagcgtatttgtcgccaagtttaacttgttttacggcatcgccttcagaaagataagagaataagcgaactacgatgtttgtatcgatatcaccaattttccagacttgtggaactttagctttagggttcaaattgacgacaggaagactgccttcagattcaaacacttcgtttatttgttcagacatagtgttttccttttagtaataatttatatttatgccaaaaagagcccgaaggctcttaatccacaatcgggagcaaagtacgataaacttcaaaattagggcctttttcgtacccattaacgttatctacgaaaacccgatacgaattttcattaggaaaatctaatataatctgagagcaagaggtggaaacatctccaccatccttcttagctacaataactgtttctaaataagctttcattataaacctgtctgggaccacggtccaaatacgtcttcaaacgaatccgcttctgttttatcaaaacggaaccctttaataattggaaggaaaatacctacagtaccttcacggcctttagaatgaacccaaccattacattcacaatcagcgatacgtccaattaatttaccttcacgagcttcggccattaatcgttcacggtctaaatcatgacgctcgtctaaaggaataagaacctttacaccgtcaactgttttatgagttgtatctttaaaacctgaaccacaatcggttgtaatacgacgacaacgtgatacgagttcgacaccacctaatttgttagggtctttagagtgttcgtagtatcctacaacttctaaagcgatatcaataacttctttaaatttaattagattcttagagcgtttgttttcccaatatgaatcacggtttttaaggataataccttcaagaccttggtcaacatattttttataaaccactttagcttcgtcaagattatgaactaactgattttcaattggctcaattcgtttaaagccttcagccatattttcaagagcagcaaaacgaacatcatatttctgacctttaattttgccatcagaatagacttcatctaaaggaacatagtcccaggcttgaagaaccataccttccgcttctttaggagaaatagtcccttgaagagatttatttgctaaaccatttgaagtgctacggtctgcaacttgtacttcttcggattcttcattatcaccaaataagaacgacaggtcatttcctgagctcacagcctttttaatatcaaatgaatgataaactaattcaccgtcgattaaaaccccattagggtgtctttcacgagcttctttagtcatttccattagttcatccgctaatagagtaagaccatgatattcattaccagcacgagaaaagaattgaacaccatcatcgcgaacttcagcgaaacaacgagcaccatcggcttttaattgagcaaatgcaggccatttaatatttttagtaatcaatttctcatcatatgcagatgctaacatctgtggttgcaattgaataagtccaggccacaccttattcgcgatagacactgaagcacctacttcaaggtcgcgcatcattacacgacgaaggacttctacatcgtcaggtttaccgtcagcgatataacccatgagctctttaattgcagcattaccagtgagtttacgagtggctaatgtgaactcaataaaatccaacatgtcatctaattcaagaagaccatacgcttgagacctttcacctggtcctggccatttcttaatataatactgaatgccacgtgcatacgttaaacgatacacacgttcaagtaatttgttgtccttatttttcttaaggatttcctgttttgttttagtagaaccgatcgcagctatttggtttaaaatatctaaaatcatttgatatcctcgattttggttacggttctattataagccacttcatctagaagcgatttcagcgttttctgataagtggtaatccatttaccgagtccttcaacataatattctgaaatgtagatgaacccttgttcaacacactctttaaatatttctgcgtcttttactgaacgaaacaccggccagtctcgaaagaacatgttaacatgaccgtagtcacgtgtggtgtttttgccatctgtaatatcatgaactacaaacataattagcccttaacaatttatagaccaagtccatttagacgaatctaaaggaaagttttgaatcgtccaccatggctgcatatcggttggtcctggagttcgccaggtgtacggattcgacggaccgccaatttgattaggccatgcacctggacttgttgcaccagattctttaagcaaatctgccaatcgttttaaaaggtcttcacgatctgaatctgaattatgctttggcggaactaaacgagattcaatatcatcccatgtgtgtacacgttgtgcagtgcgaggaatatcatcacgttcaccacgagccaaccaataaatcggtacattaagaatttctgccgcatggtcacaatgatgagctaaatcgtcaacgtaacaaattacgttatattttgttttagctagttcgaataattgttcctttgaagaatcatgaccacacatcattacttcagagaaagcgcctgggaacaaagcattcaaattaaattgtctattcaatcgagcatcaattgaatcacctaacgccgttacggctacaaaattatagtcttcttttagtttattgataactcgaagagcatccgaataaggcgctaagtaacgaataaaatcagagcgattatatttttctattaattgtttaccaaggttatcgtcggtattgaatagtttaccaggagaaataaatttttcgtcctgaatcatttttaaaatatgttctaatggaagattatatttttgggcaaaataaggaagtcccgattgccagcttaaacatacaccatcaatatcagtcaaaatagtaggcttcataaagagtctcttaataggtttaacacatcaataaattcagcttcagttagtattgtatcatcttttgttaggtggctggccatgctatgcttcaaaatttttcctttagaggcttgtaaggcatcgcgaaaacccttgttttggatcgcggcttcaaaatatgcatttgtgtataattctttccacgcttcagagtatcttgaaaatggaactcctaaccagaagagagtcccatggtcctgagctcttgcataagaccttccagcttgctgtgcagccaatccagataacccaaatatacgtctttgttgttcaacatttttcaccttacatccttggagaaatccttcaagacctccgaattgaataccgtccataacaaaaggccattgagcaaagttacttagtgcacatgacggccacttgaaattgcttcttatctctaactcagacatctttaacacttataatttcaacatcagcccaatggccgtatcctggtatacggtcttcgatagataaatttccgtcatttttaggcattttaattgacgtaacgtatggttctaaacggttttctgcataatatggaaaaacgtccgtcacacgataagtaacttcaatcatttctgtaccaaacaatttctggattaattttttaagcatttcattagaacctcatctgaaaaccatgtgatttaacattaccgccgccaatatcagaaatgttaatttcacttgcaatcgaaggatcgatgtcaatttcacgattaagtttagtgatagctaaagtatcatgtccatttactgtacgaaactccaaaggacatactacgttgacatagtgtttaattgactcgctagtaggttgcaaatgggccggaaggtctttaggtgctttagagaaaacaacttcacaaaagtttttgcgggtatcaaaataagtggtcataaacataatattttcctcaattgggagccgaagctcccagttaaattagatatcgaattcattaagaactacatcaaagattgcttcgagatgttcaggtttagctcggttactcaggatatgacgaatccaagttttaaccaaaagtttacgattaacaccgttccagcaaggatgagtacctaaatcacgctgacggaaatcatcatctaatgcaattttaaaatttgaaccttccatcgtgattgaaaccgtgatgccattttcaaatcgcatataaacgtaattaggagtcatgcactgttcgatttcacaaactgtaccgtttttgtgtttccataagcaaataacttcagaagaaccagcgataccgttagaaacatatttacgttcgaagttgatgtagttcattttattctccagatgtttaagttgtttgttggtacaggtctataataacataacctgtaccaaagtaaactgttttatgcaactttaatccaattgtctaaatttaaaacacctttggctttcattttttcgatcaggttatctgctgtaatgcgtccattttgataccatgtaacatcttcagagtaaccagtttcttcgtcaacatatgtttctgaacgaattttacctgtaataatagtttttaattcgtatgtgtcacctgtgaaaaagtttgctaacacaattttccaagagaaatcatttgaaggaccttcaggagttgtacaacctacgatctcaaattgctctttgtataacatccactggaattctttaatttcgatagctttataaccgtcgtggtctttacatttgatgtatgagttcaggttgattttcattttgttctccagtttgttttattgattaggtggtacaagtctatagtaacacatcctacaggagagtaaacattttttttaaactttttctgccctaaacgcacaaaagggagaccgaagtctccctaaaattatgcaacaacctttccaaaacgagaagcatcatctcgaagaactgcacgtgctctgcgcatgatcttctcaactgtttgattaatacgagagttcgacccacgcttgtatccagcgcgtttagaggtaccatcaactttcttttcaactgctttctttgctttagcttgttttgccattataaattctctttaaatgaaaatgcaggacttattgacattgcctgcgcaagccctcaaggggaacataggttttggatatttaacgacaggataaccataaacccgtcatcataccaaccacgacttagacagataacctttttctgacgcgtgatagtacaaaatacattcaagaggtacaccgtaaaattgtcggggcggtacttctaaaacataccgattcgcaaatcgataatcagacaattcgacggctcctcgatttaacttacttcagggtaataacaaaatgacgaactgctttacgagctgctgaagccagaggcttagcatatttcaattcatctttctgagccagtacatcacgaagatcggcctgtgctggattcagatgtttgaaatactgtaagatttccagtgcttcggcttcaacatcaattgacgcgccgtagttttcgtgaccgttattccatgcatggcgttgcagttcaagagcgtgttgtaattgtttaatcattttaaattctcaattcgagataatatttagtagccacgttcgtctgaatttcaccttctttcgacaggtctctcagttgtaggctaccgcttagaagagtgttctcttcatatagttatttatatcacttataaagacacggaatagctttatagtggcatgttacgaatttctgtttaatttctttaggttgtttaagacctaaagccacaaatggatgtggaacatttcgaatttgtccaactggtagtggagtcaaatcaccgacttcaacaaaaccttcaggaacatcaggacctacagaatgaactacacatagttcaggaacttcaccttgaacacgtttaccaatcacaagtcctgattcggtaacttcttcatcacctgcttgagcgggttcagaaaccagaatgacatattcaccaacagcacgaattgggagttgtacttcagacatcttatttccttgttgtttgacgatagattaataataccatactattcgtaaagcatattacataagaagcaaacgttcgaccggagtaccatcaaccgaaattactttatcaaggcggaaagaacgccactgacctaacttggtatcaaatgctcgaactgattcacgaggttcagaacgaacttctgttgccggattgttattttcatatttgacttcaagttcatcacgcgaagcaaacatagtgcgtacctcgccgttagccttttcaaatacaacacaatgaacgcctacagacagaatagttttaatacgttcacgaagaaccatagtttcttgttcagttaaaatcatattattcaccacaaaagtttcggatttgttcccaattcagagaacgaagattattacgagagtactgaattacttcaataccggcttgttttagaatgtctgcccaattttcaggagatctgtcatataattctgcgtatacaacctttttaatacctgactgcgtaatagctttagtgcaatcaggacacggagaaagcgtcgtatataacgtagcaccttcaatagaattacctttacgagctgcaaacaaaattgcgttcagttccgcatggatttcgttattagcagaccatgcactatgagccgctcgatgttctttagccaaaacaaaattatctgcccgtccaaatgctgtagtgccttctttatgaccggcaatgatgacaggactcggcttgttcttcaaccaaccttgttcagtagcatggtcacaacagtttataccacctgcaggtgaaccgttatatccagtagagataatgcgtccatctttttcaatgacggcacctactttccatgaacaacattttgattcttgagaaatcaaataagcaatttgaagatatgtgctagctttcattattgaaccttattaatataagttaacagctctttagtttgttcccaactgatgcacgcatcggtaacggaaacgccataggacatattatcagaaattttttgatttccttcatgtaggaacgattctatcataattcctttgaccaaatcattagctgctaaatttttaccaataccaatttgattgctataatgcccatcagcgtttgcatggctacagtcaaccattacataatgattcagacctactgcccttgctttgttagaagcttcttgaatatcagaagaatgatagttcgggccgttggtcccgccacgcaatacgatatgcgtattctgattaccttcagcttcaacaatgcctacagtaccatcgacgtccatacccatataccgatgaggccaggcggcactatacatcgcgtctgtagctactttaatagaaccattggttgcgttcttgaagcctacgcacatcggtagacctgaagcaatttcacgatgtgtctgactttcagtcgtacgggcgccaatagcaacccatgagaaaataccagaaagatacttaatcgtgaatgggtctaatacttcagttgctaatggaagtcccatacgtagaagtttacgacacaatgttcgtgcaactataagaccgtggttcatatcaaaacttccgtcaagatatggatcatttacaagacctttccaacctacggtagttcgaggcttttcaaaataaacgcgcatcactaacagaacattaggaagacgagtttgaagttcagccagacgtttgccgtattcaacagcagcaatagggtcatgaattgaacaaggacctacaacaataagtttgcgtgggtcttcaccgttcataatcgaattaacttgttcgcgatgagaagccacttgtgatgcgtaagcttccgacaaaggaataatctcagccagttcttttggagaaataagttttccgacgacaggtaacataacaatccttaggagatataaacagattctgattcaacaatacctttaaccggattagacaggctaagttggtagtgctcagatttatgaccattctcgatagtaatgagatagctctcattatagtgttccatatactcgagttgcttcaacaagaccatcactgcctaatttaagattagtaatttggtcaccatctttaggattaacgattatgagaaaagaacgtggagattcttgaataactcgtaatgttgcatcttggaaacgttcagacactttattgatgagtgcttgagcaaattcttttactttaatctgaaattcgtgtactgtaattgggttttcacttagcatttctatttcctcatttgttggtagagttatagtatcacaactccaccatgttgtaaatcattaaattgctttgcattcaattttttgtgtaccgaaattgatatcacattggataactaaatcgccgtcaagatcaaataccactatgacgtgtgcagacccagggagaagagtaatagcaatagaatctacttggtctgggagcaaagcattgagtacatgagttagttgagcatgaactctgagttcggctgcattatcaagcacttcaaacatattattagcaataatctgactgaagactacctttacaatttcagaataagttgggaacataattacctcagtgtacagtatttactttaactcgaacaacaaatcgctcggtcggttcacctacaggaacaaactctacatgatattcgcctttgtaacgagtattcagatcattacgaattcctgcgagtttgttgattaatgtaggactcatattaagtcccactagtttacgaagcattttgtatgcttcatcttcgatttcatgatgtttatcgtacatagttttcatttaaccattcaattgcctggtcgacgttatcaaatataccaccgtccaaacgttcttcatgctcatagtccagcacatcaataccgaactgtccatttactaaaggccaggctacaaacaaatattctttatgctgttcgatggcctcaatcacttcatataatcgtttcattaaaaatcaccgaatgcgacttgccaacattctaaaccaatacgtcgccacatttccacaacctggttacggtcatcaacggccaatttcacatcataataaggagcaatacagttccaaaagagttcttccttaacaacatcatccttacgagtgtcgccttgattacgttgaatatgcatttcccatggaatagaaaacgaatccatccattttttagttgcttcgtaataacacattgaatcttctttagttccagattcacgaccacttacagtaataattgtatacccagcctgatgaagcatcttaacatattcgacaaccatagggttcggggcatctgtggatagtttatccaactcataaggcccacgagcaacatgtagagctaaagtcccgtcaaggtcgaagataaccgctttaggtttacccggagttcctttataaaccggaagtcctttgtattcttgcatacgagaatacatcgaacgtagaacatcaataggaacagcctttgtgccacgcttagcattacgtttaaccaattcggtccatggaacatcgaacacttgatatacaacttcatggccccactccttagcgtattcttcccagacaagacgacgttcaggatttaagttggtgtcggaaataataacacccttagttccgtcttgacagagaatcatatgtgccgcgtcgtgttgcatataagttacgatactttctttcttctttgtgtatttgtactcgtcgcgttcttcgtggcccatgatggattgacgataatcgtcgcggttgatattaaagaacccaggattcttagcaataaattcacgagcccaagtgcttttaccagacccaggacaacctacagtcaaaataatctttttcacagttttactacctcttcagcaaattcaaattgtccaccaagaattttagcaatttcacgtcctagttcagcacctttcttgcaatcttgcatagtccaagaatcgccattctgtgatttacgaagagcccgtgtattgatatctgctacaagcgtatggattaacttatcgattttggcttggtccattattttattcctaagaaaatttcaagaatacgaatgttatgctcgcgccggtctttattaatttcagcaacgtttttattaattgacgtacttctaacgtttgaagaaataaatttaatcatatgacttttgagttgttgcaaatccaaccctttttctttagcagctttacgaagagctttacctgcttcatctagtgcctttgctgcatctttgtcataattgccaagtgacattccacgacagatatcaatatactcatcagaccgtttgatgtaattctctagtaatgttttcatttagatttcctcaattatccataggagcattatactctgctcctgagagtttgtaaactattttactaaagattcaatatactcgtgaagagctttagtcgctactgcccacttattctgatattcattttcatgattagcacgagactgaactaacaatcggtcattagtcggaggcaaagattctaatcgttgaatctggcgcccataaatcatagccgccatttcagattcatagataagccctttaatgtattcatgctgttctttagtcattggcatttttcctcttttaaaccactacgataataacataacatagtcttctggtcatgtacatatctttttacgtcgtttaaccagatacgaaattcttgagagtcttcaaatggcattccaacccatggattaccatcaataacctttacttgccatttctggttatattcagcaatagattcaggccattgcggatgtaaagtttctttagggcttaagggcacatcctgggcacatccagccaaaataccaatagataatacaactgcggttaatttaatcattctgagagcttcctgaggtcttctgcaaaggaatcgaaggacctgttgatttgtttttcgaccaatcctggtttacttgccaccacgttcttcttcttcgaatccttacggagcttttcattttcagccttaagttggtcaactaaaacacggttcttataagtcatttcttcgattgactgatattgaactttgaagtcgtctaatactttagcattgtttttagcagcctctttaacagaggccaattcagtattcaacgaatcaactttgttgtttaagaccactattgttaccgtagaaactagagcaaaagctgctactatagcataaatcggatttactttaagcatgttttaataatctcaatgatttcatctcgggataatccattgataagaacggttttcaaaccatcacactggattttgtacgattcaaacaatacacacaactcttctgctgtatgatacgggcttgaaattccgagacggttgaatttgtcggtaagagggtcgcaaatgatgtagaattttatacctgcgatatgtacgtttggttgactaatattaatgaacacattagcgtcgtatttagtcaaattgttttgaagaaattttaccatggcattaactgcttctggcatcgcttcgcgtttctcttcagcgtatcgggtggaatactctttttgttttactttctttttaagatttttggccagtgtaacacggaggtcagtaagataaccaactggacgtcctttcttaaagactcggattccatcagttgtgtctccaaaagcggttacgaccatatcgttagtaatcaattgcatattcataattttctcctcgtgttgttgataaaagccatagtaacaccatccttggtgtttgtaaaccattaatatccttcagggatgaaatttttatgatttttaataaagactgattctagagcagtcatcatttgctcttttgaaccaccttggtaaagattcataatgatgccaaatagccaaggcgactgtgcacccttacaaatggcctgggcttctatagcgtatgttttacgatcttttcctttgtgcttgtcatatgcgtctaggcagatataaaatgatcggtctaagaaatcgagataggccttttcgaagagctcaacctttttaaatgaaaactcgtcatccgcatacattgctttaaggtcatctgaagcaccgttcataatagcaagaaacaacttttccgggctagagattgagtcccgagttgtatgaagagcaacgtaccagtcggtcttcaatttgaaatgagaaccgtctttcattacggctacatatccttcgatatttgtagaagacttaacacctgggacccagtcaccttccggtgcttcaaatctgtctacaagatatttacgaaaaacagggtctaaataaatgtcgtcatactcgatatatttgccggtattgttatctcgaatgttcaaaagaatcaatcgtttttctggatatgttagaacaattttatttgatggggcaacgtattcaaagttcgcagtaaacccgtcgttacaaagttctaataaacgatctgctaagtctttgtggttaatatctagtaaaatacttgtagcggaagcggcttggtcggatttgatagaccctttagatttgaaacgaaccatattgccgtcaaggtatgtcgagactaatgaaccgtcttctttagtcatcagatattttacatcgctaaggtcaattgacaatgtaaacgggttctcatttagattaaagaatttttccattggacgagaagcaatacgtagcggagtttcaccatccatttcgaacataataccacgacactctaacgcgtcaggcaataaccaatctgaatatgaagcaaagttatatgagaaaattcgatacttttttccgattggacttacatcatccgagtagaaaaatttacggtcggatgacgatttacacagagataacagattataataaagcttttccattttgtatcctcagttagttttttaaattgtaccacaatccttgtggtatgtaaactactttttcttatgttggatattccaaggcgggttgaactttttgataaaaagcggttcttcaaggtccattgttgcgatggtcattgaaccaagttcgttggtgactgaaaggtcaaaacattgacgggcccagaattcaacctttttgccttgcattaaggcatccaaaatcataagtgattttcttgaatctgaagtctggtcttttcgatttatagctgttcgataatagttaatgcgtttctttaaattcttggttttaccaatatacacaagttcgtcatctatagcaatagcgtatatgacatttttcttattaggggcatcaatggttttaattgttgcatcttctaatagctccaattctatatatttaataaaggaatattcggcggcaatatctttcataataaagtgggaccgaagtcccgtccttagaaatattttttgtatgaattgattacattttggtctacatcattatcaatttgtgcgacaagataagaactgatttcaacttcctgaggagctgcttgaactaaatcagagttcagatattcacgaatccaaggatacggatgcttggtcggagcatcagtgattgggcatggcaaaccgcactgtttcatacgagacacagtcaagtaatcaacaaaagcacacatactctgcgtattgatacctggacatgtaccatctttaaagaggtgtgcagcccattccttctcttgactatttacttccataaagatatctactgcttcttgctcacactctttagcaatttgaacccattcatccccatcaacaccaagttggagctgtcgaataatgtactgagtgcctttaaggtggagttgttcgtcacgagcgatgaacttcataatctttgcattaccttccatgatttccatgttcttatggaagttgaaagtacatgcaaaagatacataaaaacgaatagcttctaaggcgttaataacgtgtaagcagagataaagagacttcattaatgcacgtttacattcttccacatgcataagactatttgaatatgcatccaaatcatattcattttcggaaaaacatttaaaaatttctttagcattttcccattcacgtgttttaactagaacatcatcataatatttgccgattgattccgcacgtttcataattgcttcatctaatacaatctcatcaaataccttcgatggatcagtataaagatttcgcatgatatgagtatatgaacgagagtgaatggtttcactgaatgtccatgtagcaacccatgtatctaatgaagggtcagaaatcagtgccataagtaccgcagatggggccctgccttggatagaatctaataatgattgatacttaagattgtttgtaaagatatcctgttgaaactgaggaagcttattgaactgcgcagagtccaacatcaagtttacctcttccgggcgccaaaaaaacgacaattgcttttcaataagctcttcaaaaactttatggcgttgaatatcgtaacgcgcaaggccaagaccggaaccaaagaacattggttcattcaaaacatcaactttttgggtattaaaaactgtactcattatattctctcaatagtgactcatccatgagtcaattataaacaaaattcttaaagcttacaagcggagcaatcttcagctttaggcgtttctaactcatagtcatctgtaccagaaccatctcgagtgttatgatagtaaaggttcttaccaccaaagtaccagaagtaaagcaagtcatcaagcattacagacattggcactttgcctttctcaaagactgaagggtcgtagtatgtattagcagaagcagattggcacacccattttaacatgataacaacttgtgtcagataaggcttattacctttcttagcgagtttccacgcatagtcataaagacccatgttgtgttcaatattaggaactacttgacggaaattaccttctttagattctttaatacttactgggccacgaggtggttcaataccatttgtgctatttgagacctggctgcttgattcgcatggcatgagtgcagacaacgttgagttacgaattccatgttctttgagttcagctcgaagttcttcccagtcacagacgtagtttggggctgcgatttggtcaatctttttattgtaccagtcgataggtaattcgcctcgagaccatttagtgtctgaataatactcgcaacgtcctttttctttggcgagtttgattgatgctttgataaggccatattgcaatctctcaaacaattcatgagtcaaatcgttagcgtcttcatatgaagcaaagttagaagctaaccatgcagcatagttcgtaacaccaataccaagattacgacgctttttagcttttaaagcttctggaaccggatagtcttgatagtctaacaggttatcaagtgcacgtacttgtacttcagcaagttcattaattttatcttggtcttgccaatcaaatttatctaacacgaatgcagataatgtgcataaaccaatttcagcatcaggaccattcacatcattagttggaatagcgatttcacaacataagttactctgtcgaattggagctttttcacgaataaatggagtgtagttgttcgtgttatcaacgaattgtggataaattcgagcagtaccagagcgttcagtcatgaacaattcaaagagttctagtgctttgattcttttctttctgattgttgggtctttttcagctttctcataaagctcacggaatttatcttgatcttcaaagaacgagtagtatagttcgcctgacatttcgtgagggctaaataaagtaatataatcatttttaccaaggcgttccatcataaggtcattaatctgaattccgtagtccatatgtctaatacggttttcatccacgcctttgttatttttcagaaccaacaggttctctacttctaagtgccacatcggataatacgctgtagcagcaccaccacgaataccaccttgagaacaagattttactgcagtttggaaatgtttccagaatggaataacacccgtatgtcgaacttcacccataccaatcttagaaccttctgcacgaagcataccaacgttgataccgataccagctcgtttagaaatatattcaataattgatgctgaagttttgttaatagattttaacgaatcaccggcttcaataactacacaactagagaactggcgagttggagtacgagcacctgccataattggggttggcaatgaaacttgatgagtagaaacggcatcataaaaacgaataatatgtttcaaacggtcatgagtttcgtcttgatgtaaggccatgccaatagccatgatagcaaactgtggagtttcataaatcttcccagttgttttatctttaactagatatttttctttaagctgcatagcaccagcataagtcaggtcaaagtctcgttcatgtttaatctgtgaatcgagataaatgatttcttctgccgaatattgagacaacagctcagggtcgtatttgccttcattaacacaataagaaatatggtcgataaaagcaggcggttcaaactgcccatacacatctttacgaagtgcaaacattaatcctttagcggcaacatattgatagtcaggttcttcgacagaaatcaagttagctgcaactttaatacaaatcttctggatatctttggtgctcatcccatcaaccagatgagtcttaatttcttcatacaattcgtatgggtcgatttgtgttccttcacactgccaagttaagacttgaataattttctgtgcatcaaaattttgggatacaccactgctcttagttacttgcatatattcctcagtataggttgatagacattactccaaacgggatagtatttatcccgttaatttattatacacttttaaactgaagcgttaattattcttagcaataatttctttgtattctttaggtgtcaagactgtgatatcgaaataaaccaatggttctttttccataccgtaaccaccacaaaattcacgatattcataaattcgttcatgtgaataacaaatgaatcgttcacctttaactgtgatttcactattcggtgaagggatatctagttcggtaggatttttcatttcaaaaattgtggtaccatatgaattaataaaacgtaaaatcatttataccgccattttagctttgatagttggatgagattcgtaatttttaagaacgaaatcagaatgtgtcatcgttccagtaacccagtccatttggatttttgtaggccaattctcaaaattactaggccaattaatttcaagagaacacaactctttaggttcacgacgaagaacttctttgcattgttctacatgattgctgtagatatgcgtgttgccgcctgagaacactaaatcacctgggataaggttacacatcttcgctacaatatgcgtcaaggcagcgtatgaggcaatgttgaacggcaggcccaagaaaacatctacactgcgttgataccattgtaaatcaagatgcccattacgcacattgaactgatagaacatgtggcaaggaggaagagccatttgatttatttcggccggattccaggcagaaacaatttgacgacgatcagttggtaattttttaatactgttgattgtttcaactaattggtccacaccaccgaaatcacgccattgtttaccatatataggaccaagttcgccgctatgatatccaaggtcttttgcctgattttcatagttgtcgtcccaaatagttttaccttcaattagactaccatgagtacgaagacgtaattcattaacattagtagaaccggacatgaaccacaataactcggcaatacaagctttccatgctaatttcttagttgttactgcagggaatcctttagtcaggtcccaacgtaatttagttccgaacagagcaattgttcctgtgcctgtacggtcgtctgtttcgtaaccgttttcaaggatatttttaattaaatcttggtattgtttcatttagcacctataattaatatggctttgcatcaaattttctttcaatttcaggcgtgaaatatagttctttaccacgcttagaaaagcggccaataatatgataattattttcgtcgaacgtgatattaccgaggtccatagcttttaaccaatcatcaatacttctgtgcagttttatatcaaaattccagtattgagaactattaccacggatactacaagcagattcagtaaaacaactactataaatcttgtctttaggaactactaattgatagacacctttaataaactgaggaccttgccactttggctgtttcgcatcttcttctaatagaatagggtaataattaaaattcatattttccgccagtagctatttcatttttatatattgattctgtaagggttgttacttcatctattttataccaatgcgtttcaaccatttcacgtttgcttatatcatcaagaaaacttgcatctaattgaacagttgaattaacacgatgccttttaacgatacgagaaacgactacttcatctgcataaggtaatgcagcatataacagagcgggtccgccaattacactaatgtgattttcgctggcatcgataaacgtttcaaaatttgtattaggaccggataattgaatacgtccaccggctactaaggtaacatactcatcccaggtaatataaaaatgcgctaaatcaccgtctttagtttcaggatagccacgtttaatatcacataccaccacatggctacgaccaggaagtaatgtaggcaatgattggaacgttttagcacccataatcataattgtaccttcggtacgagctttaaaattctgaaggtcctttttaactcgtccccatggtaaaccatcacctaaaccgaatgctaattcattaaagccttcaaccgatttagttggagaataggcaaataccaatttaatcattactcaaaaccccttttcaataaaccattcagtggctttattagcgtcaaagaataactcttcatatgtcttttctttgttttcaaaaactgtcacacaaacacgttgacattctccacagtattcttctgacatactcaaagcgtcagaaaacatttcattaaattcacttaaatcgggattatgcaatgcgttaaaaattgcataatcgaattcgtcattcataaattcaaatacaaaaatcatattatttttcctcaaacagactttttcacaattttccaatcagctttaaacgattcaacatcagagtggtaaatccagaatcctgcactttcaccatcttcatagagtggacatccatcgcattcatcttcccaacccatatcgcgtaaaagatgttcagctttttcaacaagttcagcgtctttaccgacgatgttgaagtaccatttacctctaacttcagaatctttgatgctctggcgttgcaatctcattttattctcctcttcacttttatttgatagggctactataacataaccctatcttgttataaactactttttaaaagttttttgcaaaagtttgatgatttcgtcgacgttggtttcatctacgatacaatggatttttgttacacctaaagttataccttcgttagtaggttgaggctttactaaatctacctcaataaagtatttgaactcgtcaggataaatctcaaaataagtttcaatttcaccaccggcagaacatacagtaccatcttccatagttacacttactacgtttgacgtatcgttatcataatcaggttccattccgtttacaacaaaactaggcccatggagttcaatcaattttaacatcttagcgttattgtgtggtgcttcttgaacaaagtcatctttaaataaagggttgatgatataagattttccgatttccattttgatttcctcatgttgttgataagtctatagtaacacatctacggaagaagtaaacaactttttcagcaatttacagatactcaaaagggagaccgaagtctcccaatttattataaaccagctaacaggtcatcaaggtcgccatcatcagaagacgaggaactcatgaagtcatcttcagtttttgcagaactaaaggcttccatgtctttatcaaaatcgtcaaggtcagaagcaactttatctgcaacagaagctgctgcggctgctgcaccaccaagagcggcagtaccaagaaccttagcgaaagattcatttaatttttcgaaggatttgaactggtctttagccgtcaaagtagtaaggtctaccatctggtcatacagttctttctggaatgcttcgtcattaatacgaggaatttcagattgacccaagaatttagattcgtcatagttgctaaaaccagaaacctgcttagctttcagaacgaagttagcaccttcaaacggacaagtaacatcaactggagtttcacccatttcggtatcaactgcaatcattgcattgattttgtcccaaatctttttaccgaaacgatatttaaatactttaccttcgttatctggagcttgagggtctttaacaaccagaatattagcccaataagaagttttacgtttcagttgagaatattcagttttgttggtattgtacaggtcatttttactaatgtactgacatacaggacaagagtcgtaatcaccatgtgtagaagagcaattttcaatataccatttaccatttttcttgaaaccgtggttaacaagaattgcaaatggtagtgcatcatcagtttttgctggcaggaaacgaattaccgcttgaccattacctgatgcatctagcttcagcttccattcgcctttatcttctgaagagaaacctttgttaccgttcagtttagccatttgagcagcgaggtcagcagtagatttacgtttaaacattatatttacctttatttagattatttagattatttagattatttaatttatttacagttggttgctacgacacttatacctcgtagctggtatgatttatttataaagtaattttaacaaacaagaaataaagcttaatacttacatgatttgattgtttctatgaacaatttcttagcagcatttccgtcgatttgaagtatttttcgatatgcctttaatttggtagaataattttgccagactaaattgtcggtgagttcgtcgtgcttatctataatattcaagaatgaatccaacaacaagaaggtttcaaatgaaattatattgctttgtagcaatttaaatatgtagctcgactgaactttattattataatcaaatatctcttgaagcgcactaacttccactttcttactgaaatagtagatgttacgtacatcttcagcaaacgtctccttggcttgtttgagacgtccaatatattccctatagaaaactaatgcatcagcgtctgatatctcaccaatccatgcatcttggttagcaactaagttactgatgaatatcaaggtgagttcctttaacttatatttctctgctagtttctcaaagaaatatttatctcggcgtttttgatacgcattatccgaaacacgcatgcaccagttatatttgattacgtcataccgaccaccaaaatggtttttgcacatcaagtatagtttatataccgattttccattaatataacgttctccatcaggaggcatgcgtattttaatcatatttccatccggaccattttgaagatttaagtctatatgtaactaaagacgcagaaatattaaaaacatttgaaacttctttacacgaggcgtattttataccatcaataattataggtttttgttttttaatagttctttctttagaatgcggctttgaatttgctattctaagagcttctttggttgaatcgggcatcggcttattcgtttttcgcccttttcggactttgctcaaggccaatttgtgagcttcagatagtttcttacccttattaggtgacgatattttcttttctagtcttgttttagatactttagccttagtctcttcagatctaggtttacctaatttagaaagtgaaatagcccttttagcttcatcactttgttttttaccaggaccacctttaccaccgggaactaagttataagtatcatctcgcaaaacaaaatcttcgttaaccaattctgcttcttttttataggcgtccttgtcattatcatattcataaagaatttcggtataaaaattttttagtccatatttagctttggccgctaatatagcgcggcctgatccaatataccaatctttctctttatgttttttgtgtacgcctatataaattttaccatttattttattggtagttttatacacaacgtatttcataataagaaatctaacgtattagttttttcaccacgagcaactgatgggcgaagcatattttcgtcaattgcttcgcttgtaattttttcaacaattcctgtaggaataaatttagcaaattgtgtttctggaatagaattttcttccaagaaagcagttgttgcttctaaataagacataccaaattgctcaaccatggattcgataatgaatccgttttcttgacggtcaagcaatttagcgatatcatctttatcatgttttactgctaattcttgttcagataaaccggtctcatcaaccggtttaatatcacttagtgaaaactgtgtcataaagctcgactacctcttcgttttcagcttcaaattggtcacgagcatctttatgataaagagctaacaaacgattaaacatttttccatcaacgccaagctcttctttagcacgagtacgaatgtctttaatcagttcattataaccagaaattttaagtttgttatcggaagcttccttgactagtttagccagttcttcaccatgcacatcttgattaaattcaactgcttctttcttagccatgtttacctcagaattcattaattacacttgttaatttagaaagacccgattttacaaagtatgaataaatcttgcctttaggttgttgtttatatgagttataatactctataatggttgaagcaatattatcagggatataatcaaaatcaatgagaaccaaattttcttggtaccgtttatattcttctgcacttaataatacttcagcttgagaacggtcattagcaattgcttcaataatcgttgttttcatactcggagttcgttcgccttcaactcgagtaaaccagaaatcaccacgaactcgaacagacgcaacaccatctttacggtcgcctttaagaattttagtcatgcaatcaatttcggcagaaccattcttaattttaacccattttttctgtggtggtgaccactgtttaacgttagggtatttgtgtaattgtgtaaagtcaccatctgatgcaacaatacataccttatgaccagctaatgacaaatatttagttaatacaccgatatggtcatccgcttcgtatttgtcaatatccattacaacgtatggcatatatttcttaatctcatcaacaacttgatggagtgcagtaaaatatccttcccaatcccactttgaagcttcacgatcggttttacgatttttcttataatagtaagcaaagtcacgacgccaatatccagaagtagcgttatccatgcacaatacaaattttgtataaccttgcttacggaacatcactacgtttttacgaattgaattcaagactacatgacgaaccatcggaacagtaattttatcaccatcttcaaagttgtttaatgcagctgccaatgcaatgttactaaagtctgcaagcgcaataccttctttgtaatcttcatccaacatcatttctaaatccatatgaacctcttgttcagttagtcaacttagaccatagtaacatactagttcgaaagcgtaaatagtcttttactcatttataaatagtaaaatagaacacataatgataagaggactaccatggttgacatcaaacgtaagttcagggccgaagatggtcttgacgcaggcggtgataagatagttaacgttgcgcttgctgaccgcacagttggcaccgatggcgtgaacgttgactttttggtgcaagaaaacaccgtacagaattatgacgatacgcgcgcgtatacaaaagattttattgttctttatgataatcgtttttatcaagctttaaacgatattccagctccggcaggccctttctctttggctaaatggaagtcaactcgtacagatgcagaatggactacagttcaaggcggagatttccaattatcagtaggtaactctattgcggttgatacttcagctggcactgatattaatttcactttgcctcaaaatcctttaaatggcgatacagttattttgtctgatattggcggtagagtaggctatgtaaaagttcaaattactgcagaggctcaaagtattgtaaactttagaggacaacaggttcgttcagttttaatgacgcacccaaaatctaaaatggtcttcatttttagcaaccgcctatggcaaatgtatgtttctgattacgaacgtaatgcagtcacagtaactcctgctaagccatatcaggcgcaacctaacgattttatcattcgacgttttacatcagccgctcctattaatattacattgcctcgcaatgctaataatggcgatattattaatttagttgatttagacaaattaaacccgttatatcacacaattgtcaaaacttacgatgatacaacttctatacgagaagccggtgttcatgtagcagaaggacgtaatactgcggaagcattctttgtttatgattctgctaatagcttatggcgtgtttgggaaggtgaccagaaatctcgtttacgtatagttcgtaatgatactgatttacgccctaatgaagaagttcttgtttttggaactaataatgatacaatctcgacggtaaatcttactttgcctacagatattttgtctggcgatactgttaaaatatcgttgaattatatgcgtaaagggcaaactgtaaaaattaaagctgctgaaggcgatacaattgctagcagtatttctttattacagttcccaaaacgttcggagtatccacctgatgcacaatgggtttctgttagtgagctggaatttaatggtgatacttcgtatgtacctgtacttgagttagtttatatagaagattattcatctgaaacaaaatattgggtagttcaacaaaacaccgtaaccgtcgaacgagtcgatgcatcgagcaatacaactcgagctcgtttaggtgttattgctcttgcttctcaagcgcaagcaaatgtcgatttagaaaatgctcctggtaaagaactggctattactccggaaacattagcaaatcgtacagcaactgaaactcgtcgtggtattgctcgtattgcaacaactgcacaagttaaccagaataccgattttgcattccaagacgacttgattatttctcctaagaaattgaacgaacgtacagcaactgaaacccgtagaggtgttgctgaagttgcaactcaagctgaaactaatgctggaacagatgacaccactattattactcctaagaaattggatgcccgtcaaggttctgaagttttatctggtattgtaaaatacacatctacgactggtactatagctgctactattcgcggtaatgctgggactaacgtttataacaaagccgtagataatttaactatttctccaaaggctcttgaccagtataaagctacccctactcagcagggtgcagtaattcttgctattgaaagtgaagttatcgctggcgaatcacaagcaggttgggctaatgctgtagtgacccctgaaactctgcataagaaaacttctactgatgggcgtattggtttaattgaaattgctacgcaagcagaaactaacactggaactgattatactagagcagtaacgcctaagacgttaaatgataggaaagctacggaaggattatctggcatagccgaaattgctacgcaagttgaatttgatactggaactgacgatactcgtatctcgactccactgaaaattaaaactcattttgattcttctggccgtaccagtgttaattctgattccggacttattgaagaaggaaccttgtggaaccattatactcttgatatttctaaagcaaatgaaacacaacgcggtacacttcgcgtagcgacccaggcagaatctaatgcaggaactttagatgatgttcttattactcctaaaaagcttttagggactaagtccactgaaacgtctgaaggcgtaattaaggttgctactcaggctgaaactgtaacaggaacttctgctaatactgctgtatcacctaagaatttaaaatggattgttcaatcagaaccatcatggactgctactacggcaattcgtggattcgttaaaacttcatctggttctattacatttgttggtaatgatacagttggttcaacacaatctttagaatcatatgagaaaaatagctatgcggtatcaccatatgaattaaaccgtgtacttgctaactacttaccgttgaaagctaaagcagctgatagtaatttgttagatggtctagattctcttcagttcatccgtagagacatcgaccagacggttaatggttctttaagtcttactaaacagaccaacctgagtgctcctttagtatctacaagcactgcttcttttggttccgaagcatctgttactcgtagattaactcttaatgattctagcggttctgaaataattttcactaaaggaacccaatctcttagtaataaagagaatttcgttgttagagcatggggtaatagcgctacagatggtgcccgtgatacagtatttgaagcgggtgacgaaaccggataccatttctattctcagcgcgctgctgataataaagtatcatttaatattaatggaacactttattcaacaggtattgtttctacaaatggattaaatgttacaggtgtttctacctttacagggcctattagtgctacaggcgaaattgtttctagttctcctattgcattcagagctattaatggtaactatggtgttatgctttataatgctggtaacagttcttatattgcattaactaactcaggtgaccagaccgggacgtttaataacttacgcccgatcacgattaacaacgccacaggcttagttcgtcttgacaatggtgttcaaatcacaagtggtgcaacaataactaccggtgggttaactgtaaataacagaattatttctaacggcgttaaaactgccactgtttataccgataaaccaacagcttctactgtaggtttttggtctattgacattaacgattctgctgtatatagccaattccctggatactggacgcgtgataacaaaggtaaccgtgaccaagaaattaaatatcctggtactttgactcaattcggcaatagcttagattcgctttatcaggattggatttgttatcctacaggtgcaaatggtggtagtattcgttatactcgtacctggcagaaaaataaagatgcttggacttcatttgcaatggtatttgatagtggcaacccaccttcacctagcgatgtcggtgctatcccatctgataatgctgttattggaaaccttactattcgagacttcttacaattaggaaatgtgagaattgttccagacccggttaacaaaacagttaaatttatatgggttgaataagaggttatatggaaaaatttatggcaaggtttggacaaggatacgtccaaacgccgtttttatcggaaagcaattcagttagatttaagctaagtatagcgggttcatgcccgctttcaacaactaatccgtatattttgttccaaaatgagcctttagggttgcagtcttttggtattggactaaatgttagggtgataaatccggaaaatggaactatagttgatagtaaattatacaattttgcgcctacaaataatgcaacttcagctgcatttatttcgtttgttaatacatacgcagataatttcattttcgcatttatttctaataacaaatttaatttgccgccagaaataattgaatggtttaaagctgctgggagttcagttataccgtcaattgaagttgctagtcttgttgatatttcatattcagcgttttatgtttcaggtaaaaatactattgcattagaacacataaaatacagtaataagaaaacaatttctgattacgcaactccattagatattgtatatgactctattgctgatataggtgctaccggctatcctagacgtacatatgaagctctagaaacgtttttatctcctgttggaggaactaacaatgaaataaaaaggatgcctacgtcatcccttgttactcctatcgcaaactatggattaaagcctacagattttctttatttgaaatttcaattaatggctgatgaagaattattagaggaaggaaccacaagactttcaattcgtttctttaagtctccatctagctctcctatatcatctaaagatataaactttgatggaactgccggggagtggaagctatatgaagaatacgttgaaataccagctgaagctgatggctttacagtatattgttaccgtacggcctcagtcggtcaaggtggactaagaaatgttattttcactgaagtatcatgtaacggaagtatagcaaaacccgctgagtttggtataaacggtattcgtgttaattatattgatgaatcattaaccggtaatgatataatggacttgcctactcagttatctaacgacacaggtaaggtatttgggcaggaatttaaagagtacacagaataaaggagacttcggtctccttttcgcgtataaatactttaatattaataaggagacacgaaatggccgatttaaaagccggaagtacagttggtggttccgtcatatggcatcaaggcaattttcctttaatgccagctggcgatgacatcctatataaaacatttaaattatacaccgaatataacaagccaaaagcggctgataacgatttcgtatctaaagcaaatggtgggacatatctcaaaaaggtaatctttaacgaaggtattgcagtcaaaacagcagatgaccaaacgaatggtattttttctggtggtggtgacgccgcgacattcgaccaaacaaacatggatattgtttcgtggtatggtattgggtttaaatcatctcaaggtacaggtgaaagaactgttgtaattgatgctcgcaccggtaatataagttctaaaggcgttattgaagcatctcaattcagagccacaacgttagcacctttaaataattacgaccttactcgcaaagattatgttgatagtcaaataaatacagttaatgctaatgcaaacagacgcgtactccgttcaggagatacgatgaccggcgcgctaacagccccaaactttttctcacagaatcctgcatctcaaccctcgcatgttccacgatttgaccaaattgttattaaggattctgttcaagatttcggctattattaagaggacttatggctactttaaaacaaatacaatttaaaagaagcaaaactgcaggagcacgtcctgccgcttcagtattagccgaaggtgaattggctataaacttaaaagaccgtgtactttttactaaagatgaccaaggaaatattattgatctgggttttgctaagggtggtagtattgacgggaatgttattcatataggaaactataatcaaactggtgattatactttaaatggcgtcttcactcagactggtaattttaatttaactggtattgctcgagtaactcgcgatattattgccgctgggcagattatgactgaaggcggagaacttattacaaaaagttcaggtacatcacatgttcgttttcatgattcagctgaccgtgaacgtggaatcattttttctcctgctaatgatggattaactacacaagtaattaatattagagttcaagactacgcagctggtagcgaaagcacctatgcattttcaggcagtggacaatttatttcacctgaagtatcggcatggaaatctatgtcaactcctcagattttgactgacaaagtcattacagacgggaagaaggcaggtgattatgacatctattcattagcaaataataattctaatacagataaaaataatttacgtgttgtacgtaccgacccagcggccgcaatgctccatgaaatttgtgaaaacaacggcatcagttggtattctggttcaacccctactgattatatgttatcttttgcttattccggcggttttcaagcaggccattcgattgcagtaggtatggaatcagggcctatgacatattcaaccttaggtaaaagttctattgttcttggggataatgatactggatttaaatggcatcaagacggatattatttcagcgttaataatggaacaaaaacgtttttatttaatcctagcgaaacaactagcctaagaaaatttgtagctggatattctactaatggaaccgatttaactactcctccaactgaaaactatgctcttgctactgttgtgacatatcacgataataacgcgtttggagatggtcagactcttttgggatattatcaaggcggtaactatcatcactatttccgtggtaagggtaccacaaacattaatactcatggcggtttgttggttactcctggtaatattgatgttattggcggttctgttaatatagatggtagaaataattcttctacactaatgtttagaggcaacacaacaggatacagctcggttgataatatggatattaaagtttggggtaatacgtttgttgatccaagcggaggtatccgtaaaaacgtcatggaaatttctgatgcaactagttggatgagctatattcaaagacttacaacaggtgaagtagaaatgaacgttaacggttcatttgaatcatctcgtgttactgctggagataggggagtttacacaacaggcgaaatttcatctggggctgtgaatgcgcttcgtatttggaacgcagattatggagctatttttagacgttcagaagatagtcttcatattattccaactacttacggtgaaggtaaacacggcggtatcggtccacttcgcccgtttagtttggctttagataccggtaaagttactattccagatttacagtcaaaatacaatacgatcactgcgaacggctatattaaatttgttggtcatggagcgggtgccggcggttatgacattcaatatgctcaagcagctcctattttccaggaaattgatgatgatgctgtaaacaaatattatcctattgttaaacagaagtttttaaatggtaaagccgtctggtctttaggtactgaaattaattcgggtacattcgttattcatcatttaaaagaagacggaactcaaggacatacatctcgttttaatcaagacggtactgttaacttcccagataacgttctggtcggtggtggtgaagctgctattgctcgtaatggtaatattttctcggatatttggaaaacgtttacttctgcaggcgacgtaactaatattcgcgacgcaatagctactcgtgttgccaaagaaggtgatacgatgaccggcactctttggattaataaagatgctgctggaatagttcttaatcctcctttggccagtgattcatcatttattcgttctgatacggccggggccaataattggtatattggtaaaggcggtgccgacaatggtctaggtttttacagttacattacacaaggcggtgtatacataacaactaacggtgaaatatcgctttctcctcaaggccaaggaacatttaattttaatagagaccgcctccatataaacggtacacaatggaccgcacaccagggcggtgactgggctaaccaatggcgccaagaagctcctatatttgtagattttggtaatgtcggtaatgatagttattatcctattattaaaggaaaatccggtattactaacgaaggatacgtatccggcgtagattttggtatgcgacgcattactaatacctgggcacaaggtattattcgtgtaggtaaccaggaaaacggttctgacccccaagccatctatgaattccatcataatggtgttttttatgcccctagcttacttaagagcagcagagtatcagcaggcggcggtgaccctgcatgggccgggccgtgtattgtactgggagataacgataccggtttgctttgggaaaacgatggtattttcaacgcatatgcaaacggccaaggtgtgtttagttttagacctggtttagctcagacattcggtgatgttaacttccactgtaatgcaggtatgtatgttcgtgataacatcgatgttaacgacgtttatattcgttctgatattcgttgtaagtcagaaattaagcttatagagaatgcccaagagaaatctaaactattgggcggttatacttatctgcttaaaaactctgttacagacgaagttaaaccgtccgcaggtttaattgctcaggaagttcaagaagtattacctgaacttgtttctgaagataaagagaccggactgcttcgtttgaactataacggtattattggtttaaatacagctgcaataaacgagcatacagatgaaatcaaggaattgaaatctgaaattgccgaattgaaagcattaattaaatcattgataaaataataaaagggccttcgggccctggaggtttatatggcagtagtaggaatccctggttggattgggacttcagccgttgctgaaacgggacaaagatggatgacggctgcttcaagggaacttcgtttaggaaacccttcatggatgtcccaattcgcgggccgttcaagagaaataattcacacacttggagcagaccataacttcaatggtcaatggttccgagatagatgttttgaggcaggtagtgcacctatagtgtttaatatcaccggaaatttggtatcatatagtaaagatgttccattattctttatgtatggcgatacgccaaatgaatatgttactttgaatattcacggtggagttcatatgtggggacgaggtggtaacggtactgtaaacggaaacccaggcacaaatggcggcgatgtaatccaaaatgatatcggcggaagacttcgtatttggaactatggcgttattgcatcaggcggcggcggtggtggtgcggtgtcattacagaatagctgggcaccaaatgctacagcaggtggcggtggcggcagaccatttggcctcggcggaggcggcgttaattggcctggtggtaatgctagttatgacgcccggggcggcgccggttacacttcccaattcggcggtggtaatggcggggatgctggaggtcggggcggagatggatggggtaatcacttatctagatctggcggtggtgctcctggcagagcagtattcggaagttcaccgtcatggggtgctacaggcacaatctacggctcctggatttaaatgataatacctctcaattataaatattgataaatgggaggtaatatgacagcaccaaaagtatcattttcgcctagtgatattttatttgggttgctagaccgcattttcaaagataacgcctctggaaatattcttatttcaagagttgctgttgtagttcttttgttcctaatggcactaatatggtacaaagggaatatttttatggattattacgtgaggtcgaaatatgatacttacacagaagtaattcaaaaagaaagaaatacacgatttgaatctgcggctttagaacaactacaaatagtccacgtcacatcaagggcggattttagttcggtgtattctttcagacctaaaaatctaaattatttcgtcgaccttattgcgtatgaaggtaagttacctagcacagtaactgaaaaatctattggaggatttcctgttgataaaacgacagcagaatattcggtccatttaagtggacttcactttacttctaaaacagattttgctttcttacctaccaaatcaaaaactccggaactggcgtatatgtatagttgtccttacttcaatttggataacatatatgcgggaactgtttctatgtattggtataagggatcggatgtgctaaatgaagaacgcttggctgcaatatgcaaccaagcagcaaggatattagggcgggctaaataattagttgttagaatacatcgtcaaatggcgataaatattttcaaaaccttcattgaattcactaatcagtgttttcttttcttcggcagttaaatttgtaattagttttctgaacgaattctgatttagctgccgaccatcttttttaattccaatctcattcaagaatccgatgaaatttgctcggtcttcaacaatatcttccctcgagaatttaatcaaaatagaagcaatagtaataatttcacgtacgatttcaatgtctttattcataacgttttattcattccatttggttgatatgggtatagtaccattatcagtgttgattgtaaatggctttttctacacttttaacgtaatcagtgtagtcttcctgttcgtacgagtgtaaggccaagaacgtggctaatagttcattatagactaaagcctcacgctcacgttctgcctctactacgttctgaagattatggctcatatcattccttataactatcaatgtagtcctgtatgtcaaagaatgacatttcatattctaggacattaagagcccgttcttcagtatagtcagaaccaaatacgatagtgatttcaccaggcttcatatgattgaaatcgacactaaaaggaatacgagaacatacttcgtctgccatatctgcaacaacactacgatacacttctcggttaacctgataaagctctgcaagttcttcgcaacgaataacaagttcagtggcaggattttcttttattttagtaagcatagtctttacccttatgtttttgtttacgtttagattgaagttccgatttcttcttgtccttatggacagaagccttattgaaatcgtgttttgctacaagattgttcataatgatttataacctcatttaaacatttgtctgtgaaagaaaactttttagccacagaacattcgatgatgtgttctttcaaatctttagagtcagtatatcccatctcagtaataaagtgacgaattaaagctttattcttatcattaacagaattaaaataatctgctttagaatcaattattctcatcatctaatttccttaattgatattgcaacgagctaataatttcttcattcattttaatatacatgtcgcgcaagaaaggttttaacccatcacgaataattgctaacgtatcacctttacataaattaaccaaataaggatggtctaaagcatcccaaccaggctgattagcatacataccatagttttcttccatcatatgattaagacgtttgatatcttggatacgtgattcaatagcatctttctggagttgtttaatattcattaataaaggtcctctgaataaagttctttctcacttccaccacgttcaatacgtacctgtccagcatacgttgcaataatcattgcttcttcacgtgtccagtaattagagtattggtcaataaagccttggtcgtcgccgcaaacttgttgcgagactaattgaggaccaactatatcaagtacttcagccatatctttagagtaatgacgaactccaggaataaccagagttccaccgttcttcaatttaaacctattagctgcacatactataacacgttgaactttttggtcattattccaatagcaagtttgccaacagatttcaggaacttcattcattatatcatcagcagaataattataaccgtaggactggaatttttctgctagactttcaggagtctcacgagacaaggctaaatctaatagctctaaacgttctttaaatgatttcatttaaaccattccttaatacgttgccaaatagatttttgtgcttgtttatttacaccaatcgaacgaataaccggttgtgactgctgatattctttataatcttctttatagatttcgtaagctgcatcaacaaatgaactgatcgctgccatgtagtttttacgaaggccaaatggcgcgtcattattttcacgaataaccgtatattggcctgctttaatctttacaattgtccctaaataagccccgtggtaccaaatatcccatccttcctgagtaggttctgcacatttacgaagttcgttaataatattcagcttattcattatgtattcctcacagtacgttagttacaagggtaatgatttctttggacacattagggaagtcaatgtaagtatatttaccaccgattttaatcttaacatcattttcaagagaagtaaacagctttgattcagtttctgacatgttgtatgcaaagattctaagagcgccatctcgtcgaatttcaatttggcgaatgcctagaactcgtttagcgaatcgaacttctaagttactacggttttcaccaatttctttaacttcaactttatctttaatattttcaaaaacaaagttcgctagttcatgcatttcaggagtaactccacgtgcttttctggtgttacgtttctggagaagttctggagcattttcttgagcaaataggtctgcagctttttggataatatccattgcttcgccggttgccacaagtccatcaccggatttttcgactaaaccttttttaatcaatacaccaatgttagagttaacaaccgatgcattgtattccgctttcagagcttcacggacattggcagcagtggtgaagttgttcttaatgatataaaccattattgcagcagttttttcattcagagcgttttcagaagctttgatgatgtaagtaactttagacattttatttctccaaattagtatttgtttgataggtctataatatcatgtttgaagcaaaagtaaactttattttgggctctttttcaaaagccctggtaaaatttacaaactcatttctttaataaggctaataagttttgcctttttagaacgaagcttttctaaatgatgtccatttgaaccgcgaaccactaaagaattgatttcaacttctaagaaatttaattcttcaacaagtgctttacggagagcattcataccaggtttaactttaccgaaacgagtagttgtgttttgggttaatttcattttagacattttatttctccaatttggttgttttgttttgataggtctataatatcatgtttgaagcacatgtaaactgttttgtgagaaaaaaaaatgcacaaaagggagccgaagctccctaatcatgtttgtccaaccaatacagccaaatcactagtgcagctattgcaccgagaaatcctaaggctagggcactcaaagtgcctccaagtctttagtgtactctgtcacaacatcagtagacttccaatactcattttcttctttcttagctttagcttcttctgctagtttacgtgcttcgtcagaagtgatatggaagatgttaagacctaccaatttatcgatatgttctttatacatttcgatttgtgctagctcttcagtcaaagctttacgagtcttgccttgaatcacaatttcgccactgataacttttttgatgaagtgtgccttagcaaaagccagtttaaatgctttttcagattcaatgattttgttatcaatacgtttctgaacgtaagtcttacggacttcaacaaaatctttgattaagtccactacgttatcgtagaccgttaatttacccttttcattaatcactgtgatgttttgtgaacgacgttcgatgagactaaaatctttcatgattttttcatgacgtagctcttcatcatcaggaagcgagtactctttacggaacttcaccttaaacccaaaaccgtgttcaccacaatcatcttcccatgagattagacctttgtcttccaacgggtcaagaaccttactcacatacgtttcacggtcgaatttatatgggatttcagttatctgcatttgagtgcgagatgtgaacttatatgttccgtgaatctcataacgcccatcaacttcatgcacttcaccgcggaattccgggaattcaacttttggtttagtgacatttttaccttgaagagcttgtaatacagcctttttgaccgatttaaaactatgaggcagaatatttgttgcgtaaccggttgcaataccagagacaccgttcaaaagaactgtcggaataataggaagatagaattttggtggaacgtgttctttatcttcatgagctggagcatattcggtatctttatagacattatagaaatttttgcttacacgagcaaaaatataacgagatgctgcagctttttggactgttcgagaaccaaagttgccttgaccatctaatagtggatagttgttattccatgtgttagccatcaatgcacctgcatcttgtgcagaagattcaccatggtgataacctaaatctgcaacaccgcctgcaattgacgcaagtttatgaaatttttctttattaccacgagccaaatctaatgcacgatgaaccacaaaacgttgaaccggcttaaatccatcaatcatgtttgggattgcacggttttcaacggtgtacatagcatatgctaaggcttcgttatcaataatactttttagattacgagaattcaattgcatattttcaccatattaatgaacgaataactattataacatctgaaatgaaaagcactacttggattagtccaaacatcacaccgtagtaccgaatcgtaaacaacaacaagagcccgaaggctcctgctaagattttcttaatcattactcgccttttaacacattaagaagagctaagaccgctaaggtaccttgtgatacggcctgttgaaataccgttgtttcgcctgtaactaaagtgttaacgaataaaaacgaccaacacaacaatgcaataatccatgataccattttaattacctcacaaataaattaaaggcctaacttaataggcctgtataaattagtaactctgcagaataaatttgaaattatcggccagaagacggttcatttcagtgagtgtttgatattctgatgtatggttgcgagtgaatgccagagccaattgacctttaccataaccagtagtcaggggtttcatgttcttggctgaaacaaagattacgtcatattcaatattattagtgcccatggtacgggctagttgcgaacggccttgacgaatgtgagaaagaattgcatccaacccttgtttagaacgttgacgtcctacaaagaatcgtgctgctacttgtcgccagtcagatgaacctttaacaaagaagtaaaaaccttcacgagaacgaaactctttagaaacttcagaaccgtattcgccattacgaactactgcaacaacttcaccgccaactgccagaaggtctttacgagttaaatatttggacatgctaatttcctcaattgattaatgtttttgtaatccatgagagcattatactctgctctcaagagtttgtacaattttattcggctatatcagaacgttcaaaaagctcttcaacagttaaacattcagtgtcatcttcaataaagaatcgagtccaacacgttggggcgatacagttatgagtttgtccggcgatagaagctacacgaataagctgctgaccattattcagaacaaatttttcaccaatttcaacatctttaaaaagcttagccattttgtgttcctcatgtttcagtaggactactataccataatcctaccgtgatgtaaacaattaaattacattaaaatatgttaaagccagccatgttccagtgaacgaacatgcaatgtaaaaaccagtatcacaaattgtttttagtacaataagaagtgcatttttcataagtacctcaacacaattgaaaatattatacaaatcattgggatactaagcaaccatattccaatccacattttagagctcatatctcaacttccgcgagttccatatatcctttgttgataacctctttaaggtctttagaaagaataacaccaaaatggtcattcatatgtccattaactaaacgagttatttcggcttcggatgacatataaggcacgtctgagtcccaatgagatagacctaaatgagtataaatcatcccttcgtcatctgcagtgttgtacattgaaacaaactcaccagtcactttatgttttgcgtagaaaaatttaaatttcatgatgttatcctcttttagataggactactatatcatagtcctacttagttgtaaacacttttatgaaattaaagatgaagataccacccgttgtagttgctcttgcggacgattttctttaggtcttcatggtctccaacgaactttatagaataagagaagacgtcaggtgaggtttctttgacattcaatataataatacagtcagcgactcgatgattaaggaagggccctatgttgattccgttgccacccggataatcaccactgtatcctgtggtaacagaaatccatttagaatccatctgatgtgtcttgacttctacacgaattccacaatatttgggatgggctaacacgtcccacgcatacgtgtacgggtcttctacatcttcaatacctttattaacatatccgtctagccaatttgctactacatactctgcaaagactgcaaccttacaacgtcgaactacatcttctttgttttggtctggattttggctcagggaataccgagcggtgtcagcaatcttcactttcatttcactagtcaaaaactcattcgacaggataaatgtcggaagattcttcagtctcaacagtcccaagttcgtctttaccatagatacctctgatgtgtagttcgccaaaataaatgcggtctccttcttcaagatagttagcatctaccggtgggatttcaataacaacttcgtcgcattctaaccagccgtagtgtgcatcaccaggatgttttaccaatttagcacaataaactgatttacacttatgatgaccacgaagattagcaattttggattctgatacgtcaaatggatgaatcataattacccctaaagaaaaaggggaccgaagtccccaattattattctgcaaataattcagtaacgtctgaaattacttcataacgacaagtacgcatcttagcatcaccatagtcaactgggatggatacaacatcacgtggatgaactttaaccttaacaactttatctgagcttgaaccaaagtggcgaatataagatttagcacaaacgtggagaccgcgagaacaggtttgagtatcatcgtcgttaactcgagtacgaggcattgaaacaactttacctggggagttatcaaatgtaccactatagcagtctaaatagtctttacgaactactttccacgcatagaaatacccatcttcagtgatttcaatatcgtttgcaaccaagaagtcgaataaacgttgtacagctttttcgcttgggttttctaacaggttttcaaggaacggcagatagaatttaaagtcttcgcctttttccatggaatcaataatacgattaaccagtcctgaacgaatttctataccttgataaaataaactaccaccttcaatagtaacattaccgtcaacaaacttagtaatagctttcttgatgttaataagttcgacagctttactaaggtttcctgcgaccagattagctttaatttcttcaaaatttgcatgacttgatggggtcgcattgtatgctacgcgtccttcaatgattgaaataaatttagatgacgcgttccatacgatttctggacgatgacctgtaataataggttcattattttctgggacctgttcttcgtcttcaaattcagcggctttctcttcagctttaaaattcttaacaatcttacgaagagtgtcggtggaaatattgaagtaatcagcaatttcctgacgagtccattggcctgatttaaccagtccgtaagcttctaactgttcttcttgggacaagcatttgatattgtacataatgtttcc

SEQ ID NO: 2 - DNA, 166250 bp, Shigella Phage 2
  misc_feature (2)..(2): n is a, c, g, or t
  misc_feature (6)..(6): n is a, c, g, or t
sncstngaattttccttattaggccgcaagggccttcatagttttagcgatttgggaaacttcatcatcacttaaagagttgcgataaccgatgaagtcggaaacaatacggaatttcttggtaaactcagcaaccattttatcactattttttgaagcattacgtgataattcatcaaagagattagttactgtccagatatcatgaccgatggtatcttttccaccattgaaatacacaccgcgtaatgaactaaccatattaccaagtcgtgtatattcttcagaaacttcatctgtactgaagtacttcatcataaaatctagttcaggatacttgataattttatcaatatatcgttgagctgaacttgaataacctacgtacttatcataatctacatcatcaaaagcatctacatataaatcacgcaaagcttcaaaaatacattggcactgaccgagttcttttacctttttctgcaaaagcggacgaataacataaaattcattaatgccaataagattagccatacgaatcaaaatattcatagatggatgacaaagagatgtagtaccatccatagagaaaatatcagaacgatgcatatacgctacataaccagtaatttcatctgcttctgacgtaagtgtaaacagttcctctttttcccagcgcccgtctttaatttcaaacttaaatgctgtagcagctttaggacgaggagctttacttttaactacctttggaatatagcttttaactaaagcttcgatttctgacaaataatgaatgttaacttcatcactttcaaacatcgccataatatcagggagtaaatcaatctgcgattctacttctgggttaataaacagaagacgctcattgtgatgaatattcaaagcgttattaaattcactatcatctaacgcacgtgctaatccacggacaatattaacacgatttttaatattatcaataacgatattaatttttgttgtattaataccaaacagacgataacttgatgcaacggctgaagtttcatgactttgcttaatgcgtttcagtcgagggtcaagatttacttcatacacaacccccgcgttgcataacttactatcaggttcaaacatgctttgcatcttcttatatgacagatttttagtcgtaaatttgactgaattactaatcatataatctcgagcagaataccccatcttcattaattcgcgatatgtatgacgaggagatgtagattctttaaatcgttttacatcttcattaaatgctttctcactgagttctttaactcgttcaatgatatttttacgagtgcgatcatctagtgaaagagcctcgcgagatggagcaatatcaagtgaacccattggaaacttaatgtaattcacttcattgcgaatgcttagccagttacggtctctaataacaccatcgataggataaacaataccgccatagatagcatataatccaccacgatcaggccagtatctttctggatttacaccataataatcatcaaaatcaggaaaataatcaatttcgcggtcaagaccattaatgatagccaaatctttgaacggtcgcatgatataagaaacttcataagcaaagtttctaaagtctttttcttcaactggaactacgatttcaataccagttttatcatctggacccatttcttttacgaatgtaggtttaatctgtgggccatcaccatccatgtaagctacataaccacgaatttcacctttatgatacgaagtaatactaaacgtatcagtataactaaacggagatttagaacctaaaccaaatccgccaataaagtcattagattcagccttagatgaactgaagtatgaattatacagcccaggagaattatcatcaccctgaatatcaaaatcactcatacccggaccaaaatctcgacaaacaaatcgtggatctaatcgtcctggaacttgaatgataaatttttcaggatttccattaagtgcatgagcatcaatcatgttagtaatcaattcacggactactgcgcgaatcttgtttgtatacaaatcagatgacagaattttaaatactttaggatttgctgcgatgctaaatgcttttgatttagaaccattgccaagaattgtttctttttcagtggtgataatcataatttcctcattaattcatattacgcttaataacttcagcaacttctagtagttcatctttagttgcagtgtcggattgaattttatctctaatatctttaaagcggtttttaaattcttcggcttctcccatatcgaaaaagcgttgaatgattctatattctcgatgaactgctttatcaaaaagttctaaatttactctatatgatttcatttcaatatcctcatttacccaattaattataccacatccttgtggtaaagtaaactactggctcatccattctttacgaaggtcagcattatctcccatgagcatttcaaaaagctctttccaattctcaggaagtttaacaacatcatatactggattttgaatcatctcacgatattcagatttttccaaagagccaagtcctttaatataacggatgctatgtttaggtagagcatctttggcactctcatattcagcgactgtataaaaccattcttgttttttaccgacctgagcgatgattacaggagttttgacaaagcgaattcgtccttgctcaaacagttctggccaattactaaaaaatccaagaagagaaggataaatgcttcctaaaccatcatggtcagcatcggtcataatagcaatattatgataattcaagttttcagctttttcaccaagaactaatccagtgattgcgcaaatatcaaatagttctttgtttttaagcatatcagcatatgacataccccaactgttgagaactttaccacgcaatggataaccaccgtgaagttctttatcacgaacatcaataagatatccgatagccgaatcaccctcggttaagaacaatgtagtatcagcatctttaccgcacagattagctttaatatgtttatgaacctttgccttagaagcctttttagctgctttagtttcagctgctttttctgctgccaatttacgagctagtgcagcttcaataattggcattaaaattgcttcattatttaaaatagcgcgtgaaatctttttagcgtcaagttgaatatgactacggatttcaccaaatggagaagtcaaacgctctttagtttgagaatcaaatcgcatgtttttcatatcacggacaaacataacgatagtcaaacattctttgacacgtgctttagttacatcaattttgaacttacgtttgatttgtggaataaggtcttcacaaatatcatccataacacagtcaatgtgatggccaccattcttagtgtgaatgttattcacataagttaattggcgaaatccatccggtgaacgaccaaccgcaatagaacaattttcttgttcttgaacaatagcgtgttcatcatactgtcgtgcatatttcttaaaattgccctgaacctttttaccattaaaggtaaattgaatatcaggataaacaacagcaagtgtctggagacgatctagtgtaatgtcaagataaacttgggacagctcattagtttcaaatgacataaaatctggaatgaaagtaacacgagttcctttccattttccaggaatagtttcccaggatttattttccatgccatttgaacaacgaactacaatattattttgaccatcgccagtttcaccgacaaacatcacagaaaaaatgttagttaaactagaaccaacaccattcataccaccggtgacacgttctttatcatcaccaaagttaccacccgcttttggaatagtccaagcagcaactggaccaggaatttcttcaccggtaggtgttttaaccatcgcttgtggaataccgcgaccgttatcttcaactgttacctgattatttttaatggtaacattaattttattcgcgaatttaaacttagtacgaataccttcatcgactgagttatcgataatttcatcaataagcttaacaagaccaggtacatactgaacactttcccatttaccaaacagaaagcgctcatgcatttcattagcagaagagccaatgtacatgccactacgctttttgatatgttcaatatcgctcagaattttaatttcattcttaatcatcacttatcctcgtttggtttcgggaatattatactccggtaatcataaagctaaaggcccgaaggccttttatttaaaacgaatagttgaatccttaaagaacagcccagaacatactgttccttctactttctgcccggtaggtccaatagcacgaaatccagtatgttggaaatcattttcagagcaaccgaaccagttatatccagtgatttcaatattcgtaaaaccacttgatgataaaattttagttgcattatcagcatcagtacatcctactaaagatactgctaatactaatgctgcgatagaacgattaatatatttcataattttcacttaaatttaatagcttgaagaagactaataattctcaagcgacttctttcatctttaactgtaaaagaaagagggtcaccagatttcatagtaatagtacattcaaaatcaaaatcttctgtaacttcttcgaagaagtcaaattcttcatcataaattagaacattactctgaaagctgtgaagaatttttccatcatttccagatgctgtactaatcattgtaacattatgacctttcatatcttcaacgataaattcgcttgtagatattactgcattaatagaaccattcctataaatagcagacattagatatttcttttcttcgccttcgcgaatacgatatttcttaccgattttaaacataatcaccctttaagtaagtcgtaaaatccgccattcacatgcttaggagcagaagcccgacgagtagacaaacgatgacatttagggcaaacatcattttctcgttcagaaatctttttaattttttcatattcatgcccgcaatcttcggattggcatttataatcatacattggcataattattccttaaaatgagctttcagcatctgatacaaggaccatgcctgttcattattttcaatagtaactttcatgacaggaaattctgtgaaatcttctatttgttcttgctcttgctcttcctgctcttgctcttcagctgcctgatatggattttccacttcatcaaagaacccagcttcggtagtagaaagccagataaagttttcgtcaaggatatcaccatgtgttgcatatccaactgtgccagtagatgtcacaattttagtaggacgaccaagatggtcaacatctaaaattttaaaaggatgcatacctaaacggcgtgcatagattccgttatcagtatggtctttaataaaattttcttgagcttgtttatttttaaattgataccatttattaacttcaaatttaatagccattaataaatttccttccagtaagttgtgccatcttcagtaatttcacgaaatacaccgtaaattggttgtttatcaccaaccttttcatacacataaaccgaagtcaagtgagtaaacttgatggtgtgttccttttgaactactaccaaatctggatcgaataatacatcttcaaattcgtcattagtgcaattctgaacaattttacgtttcattacaatttcctcattaattgaacagtggagcaatgcgtttcagaagagtagcagcacctttggcgaattttacatcatgaaaaacagtttcttcttccgttacaacacgagctttaatgttttcacaatcccaatttttgcgaacaatcttcaaaagctgcagtaaatctttacattcagcaatatcgataacacatccacgagaatcttccattatcgcacgataaccgtaagccataccataatcgttgaaagattgctcgatgataattaagttttccattttattctccaagttattttctgtatcagtagttgatattgatatagtaccataatcaactactgatgtatatagttttatgaaaaaattttaaactttatgcaaatttatgctaaagctgcttcgcaccatttttaatttggaattcaggaactaccatgaactggcctgcaaaaacaatattgtagagcttgacaccatcttctacccaacggtccgaaataaaaccagcgacttgattcgttgtccatggagttccatctgttgccgccgcaattgtgaatttatggtcttttacaactaaaactgaagaacaaagtttccatttaaatgcgctttcttctggctcaatgaactgacttgagacataaccaatgttaccatcagcgtcacgaactttaacctcgttacgaccaaaaactggatcacttacagaaagaacttcaaccagctttcctgcaactttagaacgagaagcaacggatacatatacgtaatcaccagtagagagatttacaatattcataataattccttaagctttacgaggagaagcataacgagtgatttcagattcttcaacaacccggaagtcacctaagaatacgatattgtagagcttttcaccatcttcaacccattggtctgtgatgaagccacacatcctatcagttttacttggaccagcgaaatcatcaatataatcgaattcttcatcagttacaaattcaacgcctttacacaacgcccatttaaattgtgcattagactcagtggattcaacttcttcaacagaagcaaaatgagagctaacacgagtttccagaaatttaggacttacgtaagcgtactgagtttcagtttttccagaactaggaatgattcgaactttaacttctataacacgaccagtaccattagtacgaagtcctaccacttcaactagacgacctgcagctttagaacgagatgcagacgatacacgcttaatttcaccgatagtaatcataatttttctctctttgttgttaagatttattctccatgagagccattataacaggctctctataaagtaaacttaattaaggatattaattactgcactacgtggaactacactaaaatcacctgcatgaacaacgttcagaagttcaacaccgtcttcaatccactgatcagttacccatccactcactggacctgcgaacggacgtcgaattgaaacagctttacacaacaaatcagtaggctcaataggcttaaccagagtaccgtacatacaagcgatatccatatcaatacagatgtctttaacgggttctacttcttcaatcaacagttcaaagtcggtgcttggaagggcggtagtagaaattgtaccgtatgaatttttaatttctaagaataaccaagggccttcagcttgtttgatgaagttaacaatagtgaaactattactttgagtggcgcctaaaatttcacaaaacttttcataagctcgcactgaagcaccataccagttgatttgcttttcgtctttcaggatgtaagtagctgtagtactgatattcatgatgttttccccttaatctaaggtaataaagccttttaattcggcgtgtgatttgcggaacattacttgatgtccgccaatgataacttggtcatctggaacttcataaatcgcaatgtacattccacgttcttttaagtcttcacgctcttctcgagtgaaccatctcatcatatcatattcactagcgaaagcaaaatgatataatgcaataaaccacaatggaatataattttcaattcgtgaataatctttattccatttagttttaataacatcattagcattttcaactaataacttatcatcgtgtggaataggaatactttcatggctttcataattatcgctatgatgatgaaatgacgatgaattaataccgcaaaattttagccaagttcgagttttcatagaatcaaatccacgataaggagttgattgaacgcataactcttgcctaattttcattataccactatcatcatttaatgcgctaaacgatgattcaacacgataaattttcattttattatcctcagtagctatggtgttataataccacaactgaccgaggaagtaaacaactttttatcgttttgttggaagagacagaggatcgcattcttcctctgacggagcatcttcaagacccatagcgtatcgcaaagcatacttcatcatcaggatgtctttcgcacagtcatgaatagaatcatgtgcaacgaatccatctaaggttccctttggaagaggacatgtggtcatatcacgaacaagcagaagtgcttcaattctggtacgaatatcacgctgattccagaatttacaaggttctaacttaaatgtatcaagctcattctcggaaacgccgttaagacgttgaatatcgcgaatgagatcgactaaaattggaaaatcaaatgacattccacggcaccagccttgagatttccaaggatcgatgttatgcgcattgatgtaatcattaaattttgcaataccatcgatagtgcttacatcttcatctgatggtgcaatattttttcgagcttcgggagactgatttttccaccattcgatagtgcttttagtaaaaagacgatgtcctttttggctttttaaatcaaatttgattttaatgccacgtgaaactaattcatcaaaggattcaactacttctgggttagggtcaaaggcaataacagccaaatcaataacagctgccttttcaccgcttcccattgtttcaaaatctataataaaatcaaacattaaattttcctcgctaaatcgcgaatttgacctacagtataatcttggatataaactttattaatgggctcatcaataaattttgccatagattcaatatctttttgtatctcttcaagactgtatactatctttaaagctttttcgcgaatagtaacattatcaggtcctgaattttcttggatgacagctttaatgtttgccataagagatttaaattggtaccaacttaattcaatcattaataaccgccttataaagatggctaatttcacctaaaacgtaatcactgattgtaacagttttcacttcaccacaaaagaattctaacgcaatcaaatctcgttcaatttcttccaattgaagcattaacttgcctgattcagttttcacatttttgcgatttttgctataagctatttcataaatttcgctcactttatcttgaagcagataaaactgatctttagttatttccacgaatagcttcctcaaatttaatcagcagcttacagacactttcatctagcgtaattaccgtgtctgtattactatgatatgattgtttttcaattcgtttaattgctagtatagtatcacttataagattaagcttataaaggagctcagctcctgttaccataacactgaggttatcttgcttatcagtatgcttctttataccatctattagacgatttaaatattttgaattgatgttaatcatatatcctcacacataaaacacatcataacgaccacgtgttacaccaacataaagaagctgctgagctagttcagcatctgcataatgaatacaaggcgtataaatgaaagcacggtctacagacataccctgagctttatggaatgttgatgcaggaagtgctttcactttactgaactgcgatttagcatcccaaaaatcactccatggagcttttccgcctttattccaatttttataagtttctgccgttttacctaaaaataagttaaacttatacagctcttcatcagatgaaattattttaatcttttcacgataatattcatcatcgccgtaagtttctactgttaaatcccaatgacgaattagatattctccagaaacaccacgagctttaacaaatgttgatgtatactctgcttctataatacgaactaattgtccgttattaaaaataatttctgacacaggctttccatcaattttatatgttttaattaatggttcctgcattacaataatttcaccaacgataaaatctttatcagtttcaaaaatctttttgcgaataatgctatttaacttatcaacagatttattcgtaaatgccattacgcgattttcaaacaaatcgtctagtgattttacgattgaaaaataatttaccataaaatcacgtaaagcggtatcaccagtaaatccacgtactccatgcccgtcaacaactttatcataaatccacttaccgttgcgaacatcagtagctacatcaataataggagcattactgcgtttaacttcagtaagttcacactgataaaaatctttgtgtgtaaagaatggactgatataagcagtattttctcctgggtcaacaggtctaatttgcttattatcgcctattccaattatagtacaccacggtgggatagttgaaagcaaaattttgaagagctttctatcatacattgacacttcgtcgcagattaataccctgcatttagctaaatctggtacttctttttgttcaaaaagaacgttttcttcatacgtaactgggttaattttaagaatactgtgaatagtactcgcttctttccccgacagttttgaaagaatctttttagctgcatgagtaggagctgctaaaataatgccagtttcgcccgtagatattaaagcttcaataatgaacttagtaagagtagtcttaccagtaccagcaggtccattaatagttacatgatgtttcttttctttaatagccctcataacgatgttaaaggcatttttctggccttctgtcaaatcatcaaatgtcatcgtaaattccctgcaattggtatactaacaatacgcccagtatctaaaattcgccgatataatctttgtgtgtctacatcaggcttaacatgtttaacttctattttattaaaccaaaacttgcgtggagtctcaactaatctcggaattcccatacctaaagctagtcgatactgctctttaagagttgtaaaaactttatcggcaatctccctttcaaaaaatacagcaggacgatgttcatcaagaggaacaggcaccgcaaatccatctttatctctatacactatcgcatatacataaaccatattatcctcggataagtttaaaaattgaaacaatttagcgggtatcctcttttcagtttaagtttatcaataaaagacaagttttgataccgctctacaccttgaataattttatcacacatatcatattgcatttctgcttctgacaactttttcacagttttccaatccgagcctttaagaagaacgttcaatttaacaacttcagcgccttctgctatacgagaaccatcaatacgagctttgagtgctacaatcgttagcttaatatcagaggtttgttttgatttagaaagctgagaaatgtgctcaattcggttttcacgttttttctgtatagctttaatttgattataagtctttttgattttagcccatttcttttcatctaaatttagtttatgaacttttttcgcagatgaacgaccaattcgcaaagcaaataaatcacgcttttcaatcaactcttctaaagtataatcagaacgaaatgtattatactttttctttactgcaataacattccctttaatgtatccaacgttattatcaaaacgttctaatgataatttctcgccttcaatacgattatcaaaaggttctcccgagtaagcacaaactttttgatctaaaatgttcttaatgtaattgaagtctaagttaaaatctttagaacgtctttttgcagatgcctgagtatgctctagacgacgtttaattttacgaatttgattattagacagtttcatatttttctcacggacgggttaactacttatactataacatttttacttcagcttgtaaacaactttatgaaaaatgctttaaaactttcatggtataatgaatctaagtccttccattatagattaaatccttcaaaatcaagagtatagatagtgtatgttgaatactttttatactcgtatctatccgcaattctaaatacacttccagctggtatcattacttcctgttcatctgaaactaattccatattacgataacgatggctatccggaaatttaaaactcggactatattctttacaacgtagagcttttatagcatactcctgaaaattaaataccataggagctttgaattcaaaaataacttgtgtgttgtattctaatccagaagcaaaatgtagagctatatttttatcatatgaagctgatactactttatcaaatgtaataatatcaattccttgatttaacacctgcttagtctcaactggaacacctctccaaagaggtttatcgtttggaaccaaacgagatttgattatttcatttaaccaagtatggtcatctggtttgttggtaatacaatgaattaaaagttcaatttcagataaattaaacccttcagaaagtaattcttcacgaatagaagcacgcaccgatgcatccattgatatttaacacctgcttagtctcaactggaacacctctccaaagaggtttatcgtttggaaccaaacgagatttgattatttcatttaaccaagtatggtcatctggtttgttggtaatacaatgaattaaaagttcaatttcagataaattaaacccttcagaaagtaattcttcacgaatagaagcacgcaccgatgcatccattgattttattttaaaatcttttagttgcattactgagtatttcattcaactacctcaatatcataaactttaaatgttccaaatgaatcgtataatttttcttttgaaatagaagttattctatactttccaattggaatcatccattcttgttcatgcacaatcatcattaagttatcagtacgttctgaatctaatccatcggtatcttcatatgtatacttaaactcagtattaggagaagaaagtataatatcgctgatatggtcagagtaattaaaagctttatcagtttttaagcgaagtactatttcagtgaaatattcagcataagaaaaagaacacgctgtatgcaaactagtagtaaatgaatctactctgttcgttgaaaacacttctccaacttgtaaatctttaataagttcttttgtcgattttgatataccacgatatagctgataaggtgatttagttaaatgctttttaacgattttattcaactgttggtgaagagcttcattctttttggcttccatacattgccaaagaacagactgctcaaaatcagtaaatttttcacagacctttttatacatatcatattgaaaatcaacgctttcagcttttatagataactgttcaacatctgcaggattaataatcatgatagcctccgtatacttcagaagctatcatatcatcgttagaaaggaaagtaaacaactttttgaattattttgcccagggagcccaaggcggagggtcaagatggtatgaagctagttcttctagaagagcatctggggcttcaattccataattctgtaatactatacggtattctttcttataatcactagaatcattctggatattcgtagaatgattatcttctaacatctcaaataaatccatactaattcctagcgataaaaaccaaattgacgattagtttcaatgatctttctttcttcttcggacattctccagcgtagtccaacatcaaaatgagcccagaccatcctaacaaatgcatttatatctttaatatcttcaataatgaatgttttacttttagaaggttgactcgctaatttaactttatcgtcttcaaacatgtcaaaaagaccatattcatgagctcttttatagcctttaatagttaaagcttcagaagaagaaaatggtgaatctgtattctgcaaaatatcttcagtatgctttataattagaataacattttctggatattttctttcttttatatctttaattaaaatatctggattttctgctaaaggaataattaatgagcactttttatcaagtgtatttactgatttaccttctttagacataaattctattgaataatgttttgctacttcaatcatgtgatttccttttgcctactaatggaccgtcaggaattttattttcctggatatacttctcattttcttccatcattttactgccaattttaagaagcaaatccaatgcttcatttgctttagcctttgcctcttctaacgtcatatctttggtcatgatttatcaccatagatgtctctcatcaatttaagcgctgagcgttctaatttcttttctttctcagcactaatcattgatttcatccattcttctgactcgttctgtatttctttatttgcctgttcaacccaaccatcatcaatatacattgagtttggtctattgaaccattcaagcattttcttcagaactttcatttgttttacctaaaacgatagtatggacaccgtcaaattcatgaatttttagcaaatttggatttaaattattccataaagaggtaataaaatatgatagcgcactttcgtccgtaattataaatttatttcccttatcaattttccagtcatatattgaatcgtatgaatagaaggataacggtttattattatagtatgcttcagcaacatcaatatagttagatttagtaaatgcttgaattgccataaatggagaattttgtacagtttcaataattccgatctttttaagttttatttcaacatcttctggaactggcattgaaataaaatcttctactagatacatgtcattgtcatatcttttatcaatcattactgctactgtaattggaacatccttgacaaacgccatactaatactattgatagacatttcaaacaaaatcgcttccataattttcctcaatcacaagatgtagatgaacaactagaatcacaagaacttccacatgaatcgcccgtccatacatgaacaggaacattggtgtcatatgaatcagaactagactgtgtattctgtgcattagatgatgtagtaggtactgaccagcgccaaggatttttataatattcttgggcttcttcataagtcatagtaactgcttctactgttccatctcccatataaacatactcaactacagttaaaggaaggtagtcatttgaaataggaactacaccttctcccggagttgtagagaaaaaatctgtaaagaaatttttaaaccaattaaagataaacattacaaaaagcctcttttgaattcgacttgcttatcgccataatcatatcgaatctctgcattaaattcgacagaaccatctgcgtacatcataaatgaatgcacaacaacttctgtggaccatggctgcagttcatatttcttcattacatgccgtgaaatgataatatctaaatcttcatttggtttaatccaacgatttaacatagtgctctcctctataagataattctattataccatactcattttgatatgtaaactgcaaaaacgaaaaaaggaaccccgaaggattccttaaattttaaccaccaatacctggagttggcgtaacagtccaaagaccttcattagcagtgatccaattagtacgctgattttcttcatatactgtagaatatgctgctttttcagaagggaatgtctgataatgagcaccagaaattttgtgaacatcagaataaagagggaaagctacagaaatttctttaccctgaattgtaccaccatcaactgcttggtcaaatgttttgatattaacataaccgcaagtactagccatataattactagccatataattctccttttgtttaaattacatgattatttataataaattctcgcggaacgttaaaatacccaattttagttaatataacaatatcgccgttaataattaccggagaataatcggctggagcattaaatttccaatgggctctaatattatatccatcagaaccaaatgctcgactagccggtctcccggctttttgccacgcgtagaaatcaaatttcattttgaatgatctataattaattttaaatcttcttcactgacaaaaatttcgtcaggaccttctataacttcaaccatacgaagttgattagttaagagctcacatacgagctccttgttataatctttaaatagctggtcaatacgtttcttattggctttcttaagctgacgcttatttaaacgagccattaataacctcggtcttggcgagcgaagttttcagcatttttcaggtaataaagtttaaagatttcttcagctgacattccaagagcaataaatttattcatgaaaaagtgaaattggtcaatcagttcaaatttaatttcaagctgatcttcgggagataaatcttgaattttcttggattgcatttcagaataacgtttcttccaaggtttccatacagcagaagcttctttttcaccattactcataccaccaagagaagtatatagttcgcgagtttcatctgcgatataatcgtcttggtttcgcaaccaagcaagaacttctcctgcggtttcaagtgaatcaggatgacgatttgtttctggtttatcattagccaaacgaatctgtaaatgccgctgcatatcaagcataacctgcagtgggtcaatattgtgcataatattctcagcatatgcacgatttgctttatcaacaccttcgatcaaatgagcacattcattaaagtaagccattatttttcctttcaattcatgggttagtagattaattatacaataaatatataaagcaataaggaggacatatggtacaaaaattaatggcacttgttaatgccataaaaggtaataaaaacgtatagcttttactatttctgctatggtaggaattttactctggaactttattctatcacctgttgcaattgcgcatggtattaatattccagtagttactcttgatacatttgtagatttagcatttgctttagttgggttgatttaaatcttagcatatttagatagccgcattttagccattaacccctgggcaatgttatttttcatatattccataatttgttcaggggttgcaccttcctttctaatcatatcattgacatcttttgatttccagggagatttatcccaaaacataaccctttctcctgcatcaactaatttagtcattcgtttgatagtgtcagggtgacgaggttcattatctaaaacccacactcgtctatctttaaatggaacaacttctaggtctaattgaccacctgtaatagctataccattttcaataaaaagtgaatctataggtccttctagaacatatacatcaccatctttaactcgttcaacaccgtaaatttttgttgcctcaggataagctttaatggtgatatatttttgaggagcatctttctttaatgcacgcccttgaaaagactcagcttttccattagcattataaattggaataacaagacgaggctcagaaatttcctttttgtatgttcccggtgctatgctattaactaatttaggccattcggttgtaaaccaaagatatttccatttatcctttggaatacaacgagcttttacatattttataattggatggtcttccgccagtttatctaatctaacacatgacggaagagatttaattattttcttctcaggttgcttaggaagttctttaggtttttctactggacgacttttacctttttcttttcttatttcaaagatatactcacgatataaatcgggttcaaactcctttaaatatattccgattgatgcatgataattacagttataacaatgaatatttccttcattattatcaccataataccatccacgagctttattctggtcggtttttgaatctccacaaacaggacatctaaaccgtaatttaaaagttgaactattatttacttgtgtgaatttaggtaaatgagctaatgcacggtatgcaaactcattatcaatccaaggtattgatgacatttttactcttctttttctttagattcctcttttttctttttaggaatctgttcagggcctttatttactacagcgcccgacgttgttccagtagagatattttcaggattaccacctgaatctccagctaccatatcttctttaataaattctttatatgttttcatattaacctttattcataaaagcattaaaaatttggtcatcaatagaaggtgcagcaatattttctgcatcatttagcaaatcattaatttcatcagatagcataacacatgtacctttatttcccgtaattgttactgctcaattacgaacgttttctttattaaattttaggttaatattttcgtaatgaaaatcctttaatgctgaatatatttttaaaataaaattgtcttttactacaataaacccaacctcactattaaaacgtggttcatggaaactgtaataaaccttttcatctataaaatcgtatgaaattttttccatttttaaatatgaaaattcagaactatacatattaacctctaattactcacctaccacttcagcgatgatatttttgttattaaagtttttatcgcaatacagaacataattatactgcattacaccaccagacttaagctgtttttgtacttcagctttcatttcaggacgatcacgctcaacgatattcataatatccgcttcaatttgagtttcaacttcagtctgatctgcagtcatagaccattcacacaaatctttatcataacctgccatagcaggctgagcagcgcaagaagctaaagcaaaaattgtagcaaagataaattttttcatgataatctcctcagtagtttatgtttatatagtatctcaatttccaacaaaagtaaacagttattttaaaacttctgcgtaatcacatgttacaaactgtttctctagcttaacgatcttacgaaaataccttttatactgacgaatctgtcgcttcgtaggacgtacagcaaacttaataaattccactcgaccaaatggaggactttcttctgctggaatatctaacaccaattcccacgtatctgcaataagtgctttgaattgagtatttttcctgacgttatacggagtaggtttaaataaaacaatatgcatattatcctcggcaatccacttcacatactttcttgtcatcaatgaaagctttaactaatgctttattaacttcagcatactgagtagtagcccattgaacgtcatctttcatcattgtggtttctttagtaaacatgctttcattcttaaaccaccccataaaaactacctttaccaattccataacaatctcctcatttaaccaacaagactactataccatagtcttgtcagcttgtaaactaaaattttaattcatttgccaaagcatctaactgagctcgagctgattcatttctttgatagcgattctgttcagcctgaatctgttgtgaacctgctacttcgttcacttcagctggagtagaatcttgttcaatttctacccatttctgatttcccttttgaacacccatcaaaaacttattccacttattcttatcgccatatcgtgatttgatttgcttaatgagttgttgttcagcagctgctagctcctcggtttcaatgaccgcaagcataaaatcagctgttgctggaagaccagcagattctgcaatatcgctcatgttaacatcggaagagtcccaagcttgtttaccgacctgtgctgcagtccaaagaacagtttcggtttcaacagccagagcacgcaattcctctgcaatagctttaacagttgtgtaactattttctgaataaactctgatgcggcaagatttacaaatacctagatagtcgacaataatgattgttggaacaaaattcttcttgagcttcaattcattcaagagagacctgaatgtgttagcgtctgctccaccagtaggatactgtttaacgattaaacgaccaagggtagatttctcacgccatttttccatttttcctttatattcagcgtaagaaatatgcccatcatcaatgtcatcaagagaaacatcaagcatgttagcgtcaatacgcttagcacagacttcttctgccatttccatggagatataaagaacgttatgaccaagctgcaaataatctgctgctaatgaacaaagtcctaatgatttaccaacgttaacgccagccattaaaacgttcagtgttcctgtttcagctccgcctttagtaattttgtttagaattctgagtttaaatggaactttacgagctttattcatataagatagccaacgtgcttcatagtcatccatccaatcatgaccaacgtaactatcaaatgaaatagataatgcttgccgcatgatgtcaggaatagcaccaacatccggcattttcttatttcgtttttccggaggaagctcagcattagtttgaatttcgattattttagacgtagcattaaacatcgccctttgctgaacatatttttctgtttcttttactaaccagttgtggtcttccggagaatcagccagttttgaaataagtgtttttacaccagaatattctgtttcagtaaatgaactattttctaatgcaacatttaacgcattaatagatggaacgctatggtactcattaacatgagatttaattaatttgaatgtatttttagctggaccactttcaaaatattctgaatccatatatggccaaacttttgaaaaataagcttgatcaaatataagatgagaaagaataatttctaccacacttactccttaaaagaatttaaactttttctttgaccttttattaaatgcatcttgtagttgcattgtaatacatttttctacatgaggagctaactcagcttttctttcttggtcaagaacagcaaagtccattacgacttttccatcaacccaatctaattttgtcacatacacaatgtgtgtagaaccatcttctagtttaatgacaatctcctggataacattttccatggcagatttaattatcttaagagattcattaaaaagacgttcttttctttcttcttccccctccgaagagggggattcatcgataatttctagatctaaatctaaatcatctttattcattaaattcttccatatcacttaactgttcgaggtcagtttctaaatcagctgctgatttacttttactttctggagatttaaatttttcaacctttgagttaattaattcatcaacttcagcttcaacaatttcattactatcaatagcacctaactgataagcacgcttaatagcatcacggaatggttgatgcttaaataaaggaccccagaatgtagtgcagttggtatcttttgcacgccaagatttttcttcgcgaatcatctcgccagtttcttcgtcaagaaattcacgagcataccagccatttttaggttttaccacgaatcctaattctagagccatatctaacaatccagaataaggatcgataccaccgtcaaatttaacatcaataaagaatttacttttttctttaacggtacgagatttttctacatttagaacaaattgatacccctgaagatcagaaccatctttaatctggcgcttaccgataatgaatacagtatcagccgaatacattacgcctgtaccacctgtcatcacggttttactaaacatttcaattgtttcaattgtatggttaaccgcaacacatggaatatttttaatgctaaaataaggagtaacaatacggaataatgacttcagtgatttagcacgagtcatatctgccacagatttttcattcaaggcatcttccgtttctttcttagaagccatattaccgattgagtcgatgaatacaataaccttttcaccgcgctcaatagcttcaagctgattcaccatatcaattttcagttgttcaactgactgaattggcgtatgaattactcgttccgggtcaactcccatggatcgcaaataagctggagtgataccaaattcgctatcatagaatagacaaactgcgtcaggatatttgttcaaatacgctgcaaccatagtcaaagacatatttgatttaaaatgtttagaaggacctgcaaaaatggttaaaccagactgcataccgccatcaatcgcaccggaaatagcaatattaagcattggaatttttgtacgaattacatccttttcattaaagaatttagatgtagtcagttcagcagtcattttagaagtggaagctttaatcaaacgggattttaaatctgcaatagacattcattttttccataggcatcattatattttcctcactggttaaagatagagtaattataacacaataaatttaggcattaatcaactgctattggatgaatagcattaaacttatgaaatgcttctgatttttctttacgtgaaacgcacatgcgaagaacctttaatggttcgtcttcttcacccaacgattttcgtttttcaatattagaagttttccaacgagcttgctctggaaactctctattaatctgctcaagcgctctattatgtttagaattactacgaattgaactgcacccgccaggagcttgtgcttttccagatacaactagatatttgaacaaggccaaatgcggataaccttgattaattaaattgagaaatgcatacatatcttcgcataaatcaatttttccatacccaatttgttctgtcgtaagttttccgaggtcataccatgtattcgtgaatccatatgagttttcacgataattaccccaagatgaagtaattttaaaaattggtagacgagcatgaccgtgataatacccgcaatccatagcatcttcaacgtattgaatcaattcatagaactgctcacgggttaactgattaattttatctacgcagcgacgatcatctttctttcgcattgaactcatacgaatagtagtatcatcatcaatcatccaaattcgttgacctgcatacatatcagtaattgctttacgagtaccggcaattccgtttacatcatcaggaatagttataattttagctctagacccataagcgtcatgataagctttttcttcatgttcacgcactacaatatggggttcataatcagtcggaaacatatcaagggcagaaactgccccgacacgctgataacttggaattacgaattgaatcatttccactcacctttatagtcttttttcacaatatgagtttcgccagtattccaccaatgatcaaccaagtaaaaatgacgagaatatacatgaagacttccgacattccatataatagaacctgctttatactgacgagttgaatcgccggcattcaaatcagatactaatttatctaatacgtatttttgccatgcataatcattacggaatccgaagaccacgtcatttgaacgcatgcttactactgcattgactttcttatcacgaatcaggtactgtactgtattagtacacatgaaatctgacataccatctttattgtagtcaaattgcatggatggacgagtataaatcatgataccacgtcgagaatcaggattttgaccaagttcagctaaacacatatcatactgggcatagttatcttctgaccaaatagcccaaccataattcgagttaatttcgcctttagaagatgctacctgctgccaaatctttggtgtttcacctggaatatctttaacaaacaagctcttagatttataccattcaagttcgcgctgaatgtattcatcattaagagcgccaaaaataaacggttcatctgctacaaatgatgcgccaataatttcaatagttttaacaccggttttatcaactacgaaatctttttcttttaatgcaagccccaaatgaagacggatttcttcaactgtcatagagtcactaatcatttaaacctcaattgatacattcatatttaacttgtaacagtaataaactccaccctaaaataatagttggaatcataagaggaaccgttacgctatagtatatacttattataatcatcaagattaaaagcaacactgctataattttgcttttcattccttctctctgatgataattacttgattttgttgtgcagactttttagtttcacccgcaattgaccaaataaatgtaataaaccaaccaataattgaccagttaaacagtaaagatgtgaaaaagattcctactgtcgattttgacccacgcatcaaggcgataaaccatggaagcatgtatataataatagccaacacacctgaaactaaaaccataaaaattgaacctgctactaaagtttccatgttttcctcacttagtcaaattttttacgcatgaattataagaattcactacatactccatcggagcatttttaccagtacgccattggtaattattagcccaattagcccaaagctcggcgcagtaattttcaattttttcttcgcgtgtaattacatcagaattacgatatgcttgagcagattcatctggacgaatagcttcgtcaaaattcgcctgcatttgttcgactgtttgctttggagcttctttataacacttgacattaggattataaaatttgcttgaacagtttacaatttttcctacatcagactgatttactaccggtccttgagctacacaaccagtaagacctaatgcaataaccaaaatagcgattttcataacaatttcctcaaatacaagtagtaattactccagtagtgcttacacaggtattacctaattgaacacccagcgttccattagtattcatatgaagattatcatcaatttttgttgatactttaccattcatgtgaataacagtattagattcaatcacattctgagtgtcattttcaatatcaataaatggaacagctgctaatgcaactaaacacactgctaaacaaccataaacaattttcattttattctccaaatccgtatcagttgatagttgtatagtaccacggaagaacagggatgtaaacagttttatgaaaaatttttaatgaattccaaaggtccagaatcatctatttttcttaagtatagatttatattacttgtatgaaaaggggacccggaggtccctagatttattctatcagccaaacaggaagtctaacgaagctttttcctcatagtccatacctgccgattcacacatacccgcaagtggtttaacaaacgatttttggaacaaagttgagtagtcaatccaagacagtacgtcagaacgaatttcttttggaagttctgtgcccgacggccaagcaatgcacttatcaccaaacggatttccttcacgtaatggaagaaccattactttatttccatccaaaattggagctacacctaaaccgttaacagctcgacgataagttagcacaccacgaatatggaacgggcatttaaaccctggccaacctttatcatcatatttcgctatatcgttcgcggtttttacttcagcaataactttatagtcaagctgacgatattctttctcgaagttcttgtagtattcttggacagactcttcgccttcctgaagaatacgacgaatactttcttcgagagcttcttgtactgcttttggtgttgaactctgctgagtttccatacccatgatttttagatgtggttcagcaaatcgcttatcttccatatcataaacgttcagagcataacgttttttcgctttccaaaatccaccaacaccctttgaaccaagtggagggcaagaaatagcttcacggtccatatgcatcagatgctcgcggttattcatataatcacataactcacgatatgcaacatcaatcataggttccatctttttcttaccaaactgattcatgaattcaactaaatcattttgttctttaaagcggtcaagacctactttttcaattactttatctacacaaacatataccgaatcagtatcacccgcggcgatgaaatcttcaccatcagttccacatactttatttagatattcattaattttacgagcaatccactgaataccaacttgaccaaaaattgtgatagcagtagcatttcgcaaatcatagtaacggaaatgaatattaccaagagcaccataaagactgttaataagaattttacggttcagctgatttgtgttagcaagtgtagctgctttttcacattcttcgatcagactattaagaacagattcagtgtaattcgataattcgtttaagaaatcatcactgaacttaacatatcgttcaacttctggtttagttgagcaagaccctgcacctttcataataatctttttaatagcttcggcattcatttcttcagcgaacattttctttttccaatctttacgctggaaaaatactttagcgatttcctttggaatgataccttcttggtgcttatcatacatccatccattcggagagcaagaatattcatcacttggcttaggagctgttcctgcgatatattcatgaattggatgaactttaaactgcccgcgaatagtctcaggactaatgttaacctgacgaataatgctaggatacagagacgtcaagtcaaaactcataatgtatcgacgagcaatcggtttaggttcaaatacaaatgcacctggaaaactctgtttaacatgcgaaccttgttgaggaataaccttatgttcacctttcagtgagttaaaaataatagcgtcccaagttttaataggactcattacaccagaaaaaggcattttagcgtaataagacatacttaaaactagatcgataaacccacgaattttatcaattgcttgaactgattctacgtcaatgatgttataactaatgtatcgttgatgattagtctcacgaagtttattaataggaccatcgtacggcaatttaccttttttggtttcatgttgagcaactgattccaaagagaacgatggcaaattagtaaatgcgaacttcttgtataaatctaaataatcaagaatagatacgccatcaatagaataaatttctttgctaccgtacatattttgaattagtttagattttactcgaccgattggagagaagcgtttcatactgcgttcaccgagaaccattttaacacggttcatgatatacggaacgtcaaatccctcaatattccaaccggtaaaaatagcaggtcgtttctgttcccagagattaatatattccatgagcatatcacgctcattatcaaatggcatataaattactcggtcaagaatttcttgaggaacttcatcaccaccttcacagtcaagcttagcagctaactttgcatcccattttgatactgaaccgtacattgaattcaacaaatcaaagacgtaaaaacggtcgtcaattgaatcataatgagtgatagcatcaatttcatattctgctttcattgggtcaggaaatttatcgccagtaacctcaatgtcacagttagctacacgaacaaattttcggtcataaacaatttctgaaccatatgtatcactgatataagcgagtttaaaatcgttcataccgagagcttcaagaccgatgtcttccattcgcttcatccagtctcgtgcatctttcattgatggaaatttttgaggagcgcaatttttaccataaatgtctttgtattttgactcttctttacaatgcctaaacatagtcggaagatattctacttcacgagtacgttcctttccgttttcatcaatataacgctcaacaatattatttccgactgtttcgatagagatataaaattctttcatagatattccttagtttatagcccgagttattaggctcttgatatattatactccaaataaggggccgaagccccttgcttaattaccaatcgtatatttaggaacgagtttccattcatgtttttgtttaaaagaaataactcggaagttattagttaaatctttcataaaagttctttgaccaggaacgatttcaatcagtccccaatcttctaacagccatgcaatcgaatcacgacgaacttcatcttcttctgtcatttcaacttgacggccatccatacgaagcatttctttaaaatgaacgatatagtatagtccttttttctgaagaatgtggcaggactgatacagaactttatctttattattagcaattcccatacgagtcaaagtttcttttactttcagaaaatcttcaggttttttaagagtaatttcaatcattttaccattccaatgctagttttttgagttgtttctgttcttttacattcttagtcacttcttttaaaaaatcatccgtgactaaaccttttagttcttttaatactaaaggaagttttccatttttagtaagaattgatttatagttaattgcatcatttgtattaacttgatacctcttagcaagtaacttaataatcaatacttcggtagaatcttcgaccagttttgcccatttaccgtatcttttaccccgaggaacagcagccatcagataattaaaatgggcttcatcgcttaaacctgatccaattaaattcatagcatatacagcgggcatgcattcaggaaattgtgataatgcattctcaaccatgtattttgaataatctttttgagcaatagagcatttagttttattattgattgctccaattatttcaaaaaattcattttcagctttttctttaaaagaatcagcagcagattggacagctgtccaatcttttgaataccaagcaacttgatgctcgtttaattgaatatcatcttcaaataagctcatatcacttccactgcatttcgcatgccaattgaatgaaaagatatgctaaatgtaattccgtattagccgcaattccatgatactggttattttcaccaacaatttcatacatacgaataatactttgcggagttacgcgtgtatagatttcttcggcaagtttacctacgaaccacgaataatcagctgcatattttggcgctaaagctctgagctgtttaacatctttatttttgagagattcaagaacatcatcaatagcaccacgatcgttagtaaccagtgataaaataccagcatccaaaacacctttagatgaataactatcgagctcgccaatagttttacgaaaatcaggaaaattctttttaaccaaagctgctacaactttcatatcagctatagcaattccttcgtgcttacagatttcagtcaatcgacgaatcatctgcttcatcatttcaattttatcttcatcagtcggttgaccgaatgtaataactcggcagcgtgactgaagtggtttaataataccatcaatattgttagcagtaataataatactgcagtttgaactataagcttccataaaggaacgaagatgtcgctgagactctgctagccctgagcggtcaaattcatcaataacaattactttttgacgaccatcaaatgaagctgcactagcaaaattagtcaaaggaccgcgaacgaaatcaattttacaatctgacccattcacaaacatcatatcagcatttacatcatgacacaatgctttcgctacggttgttttacctgttcctggagaaggagaatgaagaataatatgtggaattttacctttacttgtaatagatttaaaggtttctttatcaaaggcgggaagaatacattcatcgatagtagatggacgatatttctgttcaagaatgtgttctttttcatttacagtaatcataatttcctcattcaagttttagtgtaaatttaagggccgaagccctttattaaaaatcgtgggtagaatcagcttcaagagctactacataattcgcgtgttcaccttcaaatttagcagcaccctgtttaccttttgcccaaagcagaagtttgtaatttcctggttgcattttcatatttgccatattgataatgaaattaaatgtattttcaccatcataatcaccaagagtcaaagaatatttaacgcgggtcaaagcagaatcttctactttattaaaaccgttaattacgattttaccttcttttactgtgatagcaattgtatcaatctgcagaccacgagatacacgcaacagttgttgaaggtcttcagctttaatttcggtaacaacagatgctaccgggaatggaattggtttattaggagcaactactgtactcggatcagctgctggccaaaaaattgttgaacgggcatcagcaattttaatatttccatcttctgactgggaaatttctgcatcgtcattaactagagacagaataccgagaaaaccgttcaaatcgtaaatcgctacatcaaaatcaatagtgtcagaaatatttgcttctgcataagttgtaccattaaccgcgcgagtcataataaattgaccggatttaagcataataccagagttaatagtagcgaaatttttgagcagagcagtggtatctttagacagtttcatgtaatttccttcaattcaaatgagatttaattttataactaatttaataaagcaattaacgattaaaatcagcagcaattgtttccgcaacaatttgagcagcgacaattaggcgttcatctgcattaccgcaataatcatcttcaaggcgttcaccgcatgaagtcataataaatttagcaccagcatttagagattctgccgtatgtttgcgcattagttcaatccatttatcactcacttcacgatcaatagcttcataatacgcatgacgagcaggtgcagatttaattttgttctgaataacttccattgcgttatcagaaagagacaaaacccatgctcgacgaattttattttggttttgtggatttgaatcagaacgcacgtgttttggctgaatatcttttacatcaacagtataattcacggtaattttagtcataatacacctttagtcataataatcagtaacagtccaagcttcatttctgttggacattattttcgtatattctgatttaaatgcattcttaagcatagattcagtaactatatgctcttcattagaaaaattatttctcagaatatatcgttttatttcaggaatagttaatagatgctgtccagttgaatattccatgtttttcctccatagagattatactctaataaattaaagcataatctcttataaattaaaccattacagtaaatcgaccaactttcttcatttgaagatgctgaccatatgcttgtgggtcatggtctctatgcgaaataacaaaaacattagtattttttaaactatctaaaatagttgaaatagcttttacaccttcaacatcagttgctgaatcaaaaacttcatcgagaattagtgtgtttattttaacacctgaaactttttcagcaatatcacgccaagtaaataaaagagcaatatcaattcgtgctttttcaccttgactaaatgaagcataactaaaatcttcacgaccacgggatttaattgtctcattaaattcttcatctaatgtaaacacataatccgcttccattattttaagataatggttaatctgcttattaaataatggaatgtactttttaataatagcacctttaataccagaatctttgagcatatcagtcaaaattcctctatggtatttttccattactaaattagtttttgtcttaacaattttatcaagttcttcttgaagcagtgctatttcatcagcatggtcaataaactcggatgatgctttttctatagccgctttaacctttttagctttatctaccgttgtgattaaggattgctttttattgcgaatatcattcgccaacgtctgctgggttttaatattatctcggtattcatcaacaagaacttttaaattatcacgatgtgttgaaagctgttcaaacgaatgcgtgcattcagaaactttatctttaattttagaaacaactttatcaccggaacttaattgtgacaaacaggttggacataatccaccttcgtgatacatattaatgactttattatacgagtcaatttttgatttaatcaaaactgcttcttgaccgattttattaaatgcatcagtcgggtcttcatccaaaacaatattaactaatctttcattagcttcttctatttccgattttaacgttctagcttcttttgccaaatcatcatacatattctgcagacgagtaaggttatcaccggttaattttttctggcgttcaacgttatcattatatattttaatttgctggataatactatcttttttaacatcaagcacttggttttgtgaatttaattcacgtattagtgctttattaagcttatccatttcagctaatgttcctacctcgagcaggtcttccacaagctttcttcgcgcaggggtcgacaaacccatgaaaggggtataccctgctgtaccaaggacaacaatctgcttgaaactggcatatgacattccgataagctgttcaaattctgcttggaaatctttactgctggcagattcattaagacgtgtaccgttaacggtgatttcgaaaacgtttggtttttgtcctcttttgatatagtactttttctcatcatattccatccacagttcaactaaaagttctttcttatttgtgctgtttattaattgacctttctttacatcacgaaatggcttgccaaaaagcccaaatgtgatggcttctaacatagtagacttaccaccgccatttcgtccagtaataagagttttttgaaccttatctagttgaatgtcaataggatttccacctactgacattatattttgatacctaactcggtttagtttaaaattcttcacaaaagattccttttaatgtatcttttagaccattctatcatatcatcataatctaaaaagtattcatcaaattcagccatgcaaacaacaccttgtgctgcttttgatgtgatataaattattccaacatatctagaatcttcttcggtgtaatcaatatttgctatgaattcatcgttaatgtcaaatgtcgaaaacttcacagtatgcatccttaatacaagatacagccatatcttgtaatgatttaggtgtgtcattatctaaaatgttgaagttaaaagatacagcccagtcagtgcagaccgtgacctttttaatacaattatcttcaacctctagcggttcaaaccaatattcaataatttctttatgcccaatatcatcttttacttcgcattcaaaatgctgactcatcataacatttttaaattcatcaaaagtcattgtgttgcctctacatataactgatttgcatattgaataagtgcttcgcggtcagaatcagtgatgtctggaattgcattaatgtattcttccatcaacgtctgaagagattgaacttcaacttcttcactatcatctgactcgacagagttatcaatctttgacacaactcgtaatgaatgcacaactttttctagttcagattcgaacttcgttagatttttgtctacttcagttactataacacgcactgatagatttgtaaaatctttatagtcaatttttcccttaaatggatactgaattcgacgatgccaggtagtgttgtttggaataaattccattcgttctgtttctgtatcaaacatccagaacccacgagggtcattctcgtcacctgcagttagtgtccatggtgtcccaatatatctgacgttagcagcctcagagatagtatggaagtgaccagaccacacctctttataagtcttaaggaaatcaggttcaagaccgtgagatttcattcctttataaaaataaaatccattcagttcccagtgaccaacacaaaaagaagcagatgaagtttttatgtgttcaagaatttcgccagtattttcttcacacatccaaggaattaaatcaatcaaacatccgtcaaaatctactgtagtaggcttatcatatactttaacattaggatatttagccaaaagctcagtagaagcatttggggttaaagtatttttaaagtgcatatcatggtttcctacaacagtatgtagggtaataccagcatcatcaagcatttgaactatttcacgggcgaactccatagttttatgcgtgattgcttttcgcacatcaaaaatatcgccatattgaatccatgtagtaattccgtttttcttagaatattctattgcttgtttaattccatccaactgaatggattgaacccactcatcatcggctttaacacctaaatgccaatcacctaaatttaaaattttcatatatcaagaaccgtcattgaaatgcaaaataaaattattgaaataaatccatctggagtgctaaagaacccaatccaacatgctctagtgaatagataaaatgcgagaaaaagttatcacatatccaagaaatatcattatatcaaactccgtataaagctaaagggccgaagccctttattttgtaataatgtcaaactgctctttaaagcagaagcttgaatcttgatgctgatacaaaaattcataagctttttcacgttcacggtcataaagagctcggtcagatgacagttctttaatacgttcaaatgttgattccatgtcattttcatcaaaccaaacgataccgctatcatgagaaattaacggagtattatcaacacggaattttaaattttcgccagtagatttccaaaataccggaattgttccacatgcaccaagctcgagatgagtatattctaaagaacgttgtagatattttttatccaacttactcaactgataaccaaaaccggatttactcatacgttcaagcatttcgctatttacataacggtcaagaatttgcgttggcaaattaggagcaattttaatttggtctacttgatgaagacgataatactcgtatggaattcctttttctttaataggaatgaacgctggagaacgttccagaccttccataatagtacttagtcctgcaggtttaagatgtttttcgtgaaaatcaaacatctgataaaaacctttccatgtagtcgtacgaccaatccaacggttgatattcatgttaatttcagaaacatctttccagtaggttgatcgaactttcgcaatatccataggaggctgaaagttatatacggtcggtgcttcttcaatatcatcaaacagagaaactgtttcaggataccattctttcatcagaactttattaaaatcaccattatcagaatggctaaaaataacatcagctcgacgaacagtttcttctaatcccaaatttcgacgcaaagaaagagaagaatggtcatgttgataaactacaacgcgaacagaaggtttaatgttatcaataatttttttatagttattaatcgtgtcttcttcaaccgaagtagcaggaattgaattgataattagaatatcacaatcatttaccagcttaagtgttttatcatattcttttgccaataaaaccggaattgaaaatgatttataatcatgcgcgcaattacgagtaaatgatttatctttagcataaaccaaagttacttcatgaccatttttaataaaccaatcacgttgctcgagtgagaattttgttacaccacaaccttcaagacctcgagccataaaaatacatactttcatttaatatcctctttgttttggtttattttaccaaaaatttataaagcaatataggagccgaagctcctatccacataatacgccatacagagactcgttagaacttttaaattttatgcgcttatatgttatagttccttctgctttagctttatcatgagactctttaaagcgtctcatcatttcctctttagaggaacgaattttattataatctatttcagaagtctgggtgttcatctttcataactgccaccattttttgacttgataagaatcaacccacactttcatattagggtctgctcttacaataggaggattaacttctttaattgaactatcatggtattctttttcagaaattttcacacaaagatgaccattcaaagattcagtaaatcctgcattaattttaagacgcttgaattttacgcgtgtaagcatcaatcatatcctcaatctgcgatctagtagtcttccaaagaatactgatgagttcatcgttatatggctgttttagaatatcccgacttttcttgatagcatattcgtattgagcaaaattattgttttcagctgcaatctgagcgtgtttataaagacggttcagttcgcgtttatttttagacaataacttatttgcttttctttctgcttcaagacggttcttttcttcaatagaagaaataagcttttccacttcatcattaatttcgggtttatcagtcatattatttctctaatataaaataaaaatcatcatctgttaaatgataccgatagtttaattctacaccattagatttaaaagcggtatcatacggattttctggatcaatatcaatgtcaagagctaaaacttccctgagatacattttaagtaaatagggaatagcttcaacttcaggtatttcttccaagaatccggagaggttaatcgttagcctcatataaaaaatccaaactaggagaatcgtctacaacacttttcttttcagcccccggtgttctataggttgattcttcgtaatgcgtcattttatcgtagatgtcttgaataaaagtttcatctactaacgcaaccatatcgtcgtcacgactgtcatagacattgtgaacgaagtaactgtatttctttgcaacttccttacgttcttttttaatacgttggacgaatgcattaaaacaagcttgagttatatatgcatgcgggtttttatatttcgtttcatcaaaattatgaagccctttaatagaagcttctataccatctgcaatcatttcttgtttccaagattgggtgtatcctgaaaagttgaaacgtttagataagccttctgcaataagcataatggccaatccgatagtatcattctgacgaactactttatttgggtctttattatttgctaattctgttttccaatcaataatagcttgtaaaagctctttattgtttacgtaattatatttaggcttagtttctgacattttcacctcttagctcaattcatagatctattatatcataatatttgaagatctatcttaaagcatagaggatatcagttatctaagtaagcagtatgcttggaacactttttccatcatctttttaaattcatgaatatctatataatgactagttaaatcagcatgatataaaaagtctaaaaacttttcatgtgtgctagcatattcgctttcatttaattcagaaacatggctttcccaatatccaacaccagtcttatttgggaaaaatgaaattttcatgtattggtcaacatagaaaattccataattttcaatagtaatagaaatattaataaatttcatacattcatcaacttagccgcttcgagagctgcatctagtgaatcaaactggtcaacgtattcaatcaattcgccataattagcgtataaccaccattggctaaattcatactcaaggatgaatccatttccttcaatttgagttaaaccaatgccatttgtatttacttcatatccggcaagacgtaaatcgttaataagagcttcgttcatattcataccttagcaattttcaggtcagcaaattttttcttgcgttgatttttcatacgacgaatagttttatcggaaatttcatgtttttgataagctttagattctacaccaaaagctttaacatcaaattctgacaagatatattgaaccaacaattcacggacagtatttcgtccaatcttctgatcattctgtttcatcgtctgatgaagctctttttcccatttatccaaaatttgaggagttacaatatcgcctttttctagcagagaaactactttatcatatgcataagaattgatggcgtttttaatttgaatagtcatacattatcctcaattgcgttaaaattttattatccaaaaagggccgaagcccttagctaaactgtttggcacccttccagccttcgtacatcattgcggctgatattaatattgctcctgcgcattttgaatatttgtgattccaaaaccagttcagaaaaacttcgtcatcaataccctgggctatcatattttcaaagaactggcgacgagcttcagcaattcgttgcgataatttagattcaggattcatttaaattttccaattaccattttcatcaataaatttaatccagtcatttactgaccacttggtcgtatcgccttttggagcaacatttaaagtatataatccctgtttaaaaagcatgcgtttgatattcatattttcctcagctgtaacgatagcactcgtttgatttacgcttagcaactcgttgagaagtattgtaatcaaaatcatcgtcaatgtaaactgattttttcaactttcttacttcaccacgtaattgacgatttaactcatctttaacttctgaatcaatgcctttcattctacgccatttatctgagcgaaaaatgttttcaaccatatctttatgacttacaccatcaggagctttacgctttccgaaatagtcataatcacgtacttttaaatctttacgacgatacgttttacccatggagtttaatttccttagcaactgaactaaatacagcacgatcgcaaatcatctgtttattccatttaagtacagtataatgaacatctagatcatctactgctgtaacaataacaatatgtccgttaacacgataatactgatcctttttaatctctttatcaaccatatcaaatcctcaaaggcaattcatatgttaataataccacagtttgaacttcttgtaaacaactttgtgaaattattttagggaacgataagaagggaacgatagcttagaatggtaatatacagaatgcgagaaagaaaggcccagagggcccgtcttagtcttctatgatatctctatcatatccaagtgaaatgagagtttctttgaagtgtttaatgttcttttgtctagaatcattgatgaaaatgactggataacgaatgttaagagatgtgaatccagcgcgtttagcaagagatacaatcagtggacgatcatactcaatcttaccattatttgtaagaactttatagaaagtaaaaggagcattgagctcctttagaagttttgtaactgattgacatccaggacaacgacctacttcatctggaattccatagacttcaatcttgttttgtttcacaactattccttactaagagcagcattcagcttattagtaattttatccagacgctcattgaactcactagaagatagtcctttttctggagaaatcaaactaatcacgaaaaatatagcaataaaaggaataaggaaaatagctccaactgccataaacaaaaagaatgttacggttgtaagaaaatcagctaaacctttacgaaatttatacatatttacccttaattgattaaccaagcattgataagcactaaactatattgcgaataaaattctggaccaaaatgaaaaatcatatcatttatagtgtccataatataattcaatttaatcatgtttccacaccccatcggtatttgaccaaagtcgctgattatctgatcctcgccacagctttttggtcggaagatttttctcatacttcccatcaataataacatcaacatatttaagcatttctagttgtttaatatcttcaaatttatatcctgtccacaaccaaatgcttttattgggataaaaattttttactgtttgaacaatgcaatgaacaacatctcggttatcaggatagagagggtctcctccagttatagttaatccttctatataatcattattcaaacattcaattaattgttctagtgtttcaccagtgaatggaacgccatttctagcgttccatgttgatttattataacacccttcacatttatgcaaacaacctgtaacgaaaagaacgaccctgcatccagggccattcacaaaatcgcaaggataaaatctatcataattcattggtgtttaaccctatgcatgatttctttatttttgccgagattaaatccacgttcgttcggatttcccaaataaccacaagttcttcttattgtgttcatctttttaggatcagtttctccacaaatagaacaaacaaacccgttttcagtaggagtcatttcatgggtacttccacacgtaaaacatttatctactggcatgttaacaccaaaataatctaaatgttgtgcagcataatcccatacagcctcaagaccttttaggttatttttcatatcaggaagttcaacataagaaatgtgaccgcctgtcgcaatgaaatgatatggggcttcgcgagaaatcttttcaaacggagtaatattttcttctactgaaacgtggaaactgttagtgtaccagcctttatcagtaacatcctttacacttccatatttctcagtatcaagtttacagaagcgataacaaaggttttcagcaggtgtagaatacaagctaaaagcaaaaccagttctttcagtccactgcttaagacgagcattcattttagttaaaatttcctgtccaatatcacgaccgacaagaatattcaattcgtgaataccaatgtatcctaaggacactgaacttctaccgtttttaaataactcaattatatcatcatcgggtttaagacgaaccccgaatgcaccttcttggtaaagaataggagcaacagtagctttaactccttttaatgaactaattctacacatcaatgcttcaaaacacaaatccattcgttcattgaacaattcggcaaatttctgttcattgaactgtgttccaatataagaatctaatgcaatacgaggaagattcagtgttacaacgccaagattattacgtccatcaagaatttcattaccagtcgaatctttccatacgctcaagaaactgcggcaacccattggagaaacaggaatagatgaacctgtgatagctttattgttcttagctgaaataatatcaggatacattcttttgcttgcacactctagagcaagctgcttaatatcatagttcggatcgtctttataaagattaacaccttcttcaacgaacataacaagcttagggaaaataggagttatcccatcgcgaccaaggcctttaatacgatttttcagaattgctttctgaatcattcgttcagtccagtcagttcccgtgccaaatgtaattgttacaaaaggcgtttgtccatttgaactaaagagagtatttacttcatattcataagcttggaacgcatcgtatacgtctttttctgttttagattgggcataattcaacgcatcagcgatttgccatttttctgcatcctcaatatgttttgcataggtgcgtttaacataaggagaaaggactttgtctacatttgcaaaagtcgttccaccgtattgatgggaagcaacctgtgcagtaatttgtgccataattgcagtagcaacaccgattgatttaggagtttcaatctgtgcattaccgagcttaaatccgttctcaagcattccttttaaatctactaaacagcaattagtaaatggaagagcaggggaataatcaatatcatggaaatgaataattccgctttcatgcgctttcataataaaagacgggaccatatttttggcaatgtgtttagacacaataccagccataaggtcccgttgagttggaaaaacacgagaatctttattagcattctcgttcaaaaggtctttattagttttatgaatcaatccttcaatttctttttcaattgtcattttaaactctttctaagctgcttcttaaatgaagctattaattgtgttttagtgtcagattcattatattcaaatcctctttgaagcatctcagccatcatttcctcttttcctaaacgagaaaattcctttgatttatctccaacgaagttagggtgaatattattttgggtgtaatcggattttaaataagtaagtaaattttctaaccattcaagataatcaacaccttgtccctttaagccagaacgattaaatttatgcttcatttgaccttccgcagcattgcagagattacagagcaatccacgtacctttcctgcttttggtccatttaattcatggtcatggtcaaggtgattagcttgaacatcaggatttagttctcgttggcaaattaagcatttaccgttttgtgcatcataaaatttctgtttttcttctttgtataatttgccagtcaataacataataaaacccttaccttaaatagataagggtatttattattttcaagtattgtaaaacattcgatgcaatcgcttatattgtcgaatcatctttttagtaggacgagaataagttcctatacaagtggtcatattagggtcagtaggacttcctttaataaaaagtttccaaaccttaccaccatttaacttttcagtataaattaattcggttttcattaaaacgctcggtcagaaaaagaaatttgagtttcaagccattcaatatattctgccgcggcttgcattaaatttccttcgtaatcatcaatatcttttttcaacgccgatttagataatgcatatgaaatgcgttcaccctgaaatccagctttaggtttatgaagaacttgatcaattcgttctacaacttcttcaatttcgccattttctgcggattcagtattccacaagcaccaatacgtaattggcttatcgtagatgttaataatctttccatcagaaagttcaatttcaataattccagtatcaggttctatatcatcttcgcattcttttgcaagttcacgaactttaaagacagtacctgcactaagttccggccagtaattacacagccctttatcagcacgattaattctaaaccacttatctactgcaatcataccccatctccatatcaattaagtcatttatcgtcggttcattatatactgtttcttcatcagtgtaaaccggttcttccggctctggctctactgtttcccatctagccgcccaccaaggttttatagcgtaatccattctcgtactgtctgagttactacacgttcacggggctcgactagttcaacagtcggaactgcataataccagtcagaatggtaagaacctgagcgagattcatttacagacacatgaacgttatgttttggactaaaataaacacactgacgatattggcatttaccatcttgcacccagtcttctatttcgataggtttaagataatccgaaaaatcgaaatcataattttctgaaaatgcatcatggtcttcgatgatttcgctcagaactgcatcaacatctaatttattttcaatattcatttttcaccaattaatttcgcaatttattaagttcttcataatcaatccaagattctagtcctgatggcaaatcagattcaatttcccaaagaagctcttcaattttctgaagacgatctaattcttcggctggaatagtaaccattgacggagttcttgatacactaatatcgtaaatcatatttaccccagtttgaccatgcaatcgccatatttccatttagaaatagacttttcaccgttagaataataaacttcgagtttagcacgattatttttaatttgaataacctttgctgtcatcaaagttccatacccgtaataaactgtaacctcatcacctacatataccgcgcttccgcggtagtcatggatataatcagttccttcgagcatcatttaaagtattcccgcaattggtcaaatccaccaatatgacttccatcaggagcaaatacttgtggcattgtcaaaccaatttgagtatcacgacctagtttcgtcagaagctcagcgattttctcatcatcaaaaacacctttttccggcataatgttgataaattcaaatggctgtttcttcacagtcaagagacgttttgcattatcgcaatacacacatttatggatgttgctatcataaccatatactttaaacatattattccttaattcctagtacttgtttaaaagtctcgtcgtaatcaagactttgacctgtttgttctttatgtttgtatataatatcacttacttctgatagcatatttttatatgaacgagttaaagcagatttaagcacgctatatctatcaggaaatttaccgtgttcattataatacgctattgctaattcacggactgccttttcagcagtctccatatattctttacgctttgtcattttaatccaaaatattattaggcattggttgaacactcgcaagttctttaaagaactcagtagagtcaggtaatttaaccatttccggagcatgcttactaaatttatgtttgcaatgacggcatttatattcaagttccggtttacgccagttaatcaattgaacttgttcagtaccgcattcaggacaattaggaacgtttttagaagccctttcgcgacgttcaaccataaccataatagcatcccaggctggaggtttaaaatctaaatcatcacaaccatgaatctttccgcgcatttccagatcgtcttcttcaccagccataataattttaattagactggaattacttgaagctgcaatatcttctaatagacgctttttcatttcaatacctcaatagcattacgtaaaccatttgcttttgcattaagagcttttaacaatttagtgtgttcggcaatctgagcttcaacttcaactagtcgagatttgaggtattcacgttcttcgctcaagttatcaatcttttctactttaggctcttttacaactgtcttatatgtattagggttcttcagtttaattaaaatgcgtgaactgtataacattgaaccattatcttcggtttcgtcatacatttctactacgtccatgatttttaacatcatgcggagtttataagataacgaacgaatagttttgttgtgcttattaatttctctagagttcatggtgccgagattacgtgagtaataataaggaacctggatattaattaatactgatgaaccacctggcttgtgtgttacttcatcagcaataacccaatccttaacatgaactgtatttgtacggtcatcgcccgcggtaaatagtttgcgagcatgcttaaaaagcatattcacttggtcattgaattgacaagcaaatttatcagcaaatttagtttcaggaatggtagataaccaatcagccaaatgggtctttttaacatcgttaacaatagtaaattcaaccaaatcagttatagatgtctcagatttaataaagctcggcttcataaagtttttaatgttatcgcgagctacagtagaagataacatacgagaacgtttaaaccattgaagcaaattgcccaacgaatgagaataagcgttttgagtatctttacagatatgattttcctggccaacatattgaaggaaatcacgaagaatattattgattactgctctgtgtccgatctgataattacggtgtttagtaataagactgtcaaaataaatcaatataatgtttacgagttttcatattcttctcacttggttaatggtttatactccgagccatccttggctttaaattacttaattaactgtaaagcttgttcaagacgatcaagacgattaacagattcttcccaaatccttttagcctgctcatattctttctgcgctttattagaaatttctagaacttctttataagctttttctagtgcaataacttctggacgaatttctaccggttcaggtgaatcgtcaagacattccattagttcttcaagggtagtttcttctttaggagtattcacaatttcatcacatttttgttggtaaatttctttatcagtcgatgagcacgcacactttacttcacgaaggctaattataattttatatccttcccaaccacacatatttttgaaaggatatgtatgaatactttttacagtttccatacagcccaaaaccgcctctaattgataagttatagtgctagcaattgagaaaaatttattaatattcttttggttagcgtttggtgtaaaaaatccataattcacaaaaatagctactttattttcatcaagctcatattcttttacgataatcatatcagaagccaaaggatgaatttgacgataatcgccataacataatttagaagctgattttagaatttgtcctttgaaaagtctgaaattactaatccaacgacgagtaaaaatattctcagggtattctttattattaagatgataagaattaacatcaccgaaccaattatatcctactacatctttagttcgtttaatttctttcccaaatttactaagaatatctctgttgactaagtatgaaagaagacgagaccctttaaaggttttcttaatgtcatctttatctgtacgactagaaatttcacgaacttcatgaataaatttgccggaagaaacaatacttgcatcagtattattgagccattgattgataatagaaatcacactattctgactagacataggtttaactttatcatcaataacgctgttgaacgatttaatatattcgttgcgagtcatattaatctcctcagtagaaagtaagaacattataccacatccttgtggcgaagtaaactagtttagtgcatttagtgcgttgttcaatttagaacgttgcttcgtgagattttttactttttcttgagctttttctagcatcttttcagcttctaacacttcattagttgctttaacgagttcatcatctactgccttgatagacttctcaatcgcatccgcgtgccatttttcaacaggtttaagactcggattttcaacaggaagaaaattcactttattgaatttccatgcatcattattacctgaactatacatccaaaatttaggatcgtttgatgagtaattagtttggggttcaggttttttctcttgtgtaacttcgtcctttctcaaaaaatcatatttaaatgaaacgatcatatcaagttcatatgttgtcgtatctaatttaaatcgttcgaaatgctgcgaaatcttagactgaacagcagaaacaacatccatatacttaaatgcttctgtcagctgtgatttaagacattcacaaattgaaagagaatttttagtactaggtttaaagctaattcgtgcagttctattattttcttttaatggtcttacttccatctgaagagtataaccatcaaatttcagattctttaagttaatatcagagccctttaatcgactagcagtagacaaaatttgctttaattgtttacgaaatagagcaataaatctccattcaatacgataatgatttggattaaaaaatcctgttgataaatcaaccttactctgaccaacgccttgaacaaatagaggatttttataatcaatagttttacagaaatcggtgagctgctcacgagcagtcatttgtgtaatatatcccgctttactaaaatgacgtaaccattcactgctattcatatacttaaagtgaatatcacgattaactttatcagggtctaaattattttggcacaaaaatgtcataacattacgggtatagctggcattacgaaccatatcttcaatttgagaacgagttttcatagtgttccttaagatttaagtaaatcaacaattttaattaatttttcacgctcagatttagctttactactcaatccagatagtctgaaaatttcatcgtcatactgttgaatagaaatattcagctcttcaatttgcttattaaaataatcaatttgctcagaatgtttttcattactgcgaactggtacaggttttgtaggcaatttagttaaactggattcatccgggcgataaattaaaatacaacttgaaccaatcgggcatttagcaccagacacatattctaatgttccggcttcttttaaaacttcaaaagctaaacagagatgatgccccatattaacataatctgtagagcgagctctgacgtaataatcatcgccgcgaatactaaatttaaagcatttaaggtcttctgtattattggtcttaaaaatcatttgtttatctagacctttagctaatcgagcgcctaatgctaataatcgtcgttgattttcccacaaatctgcgatcatttggtcaaatgataatttcggcattagtcgaccgtaaagatcatagcctttattataattgcgaagaatttcacttgcattaatacgagacaatgctccaattttattaagggctttcataatgcgattagataaacccattccagacccgtttgttcgctgtaaatgtttttctaatccaaatccaatatcaactttaaacttatctaaaatttctgcatgaacatctctgtcaataacattcaaatccaaagttgggttaaatctatgaaaaaatttatctggctctccacgacgaagtacagtccattcattcaatttttttattaactaaagatttaattactgcattgacactattaattactactgacatattttcctcactcaatttcaattttactaaatacgcagaatatgatggaaaagactatataagcaccacacacagattgaactaataccattccaaagaaccaaacaatattatcaaacaatgtctgttttacgtcgaaaggacgtaaacttacagtaatattatcacctttttctattgaagaatacatctccggcgaaatatattcgctaaatctataaccgtctctttgagttcatatacggcaataaacgataaactagacccctttccttgagttcctgtaagggtattaactacagtaacatcataatctttataatgcatataatcattaatagcataataaccatatgcaattactatacataaacaacatatcaataaattcaatcttttaattatcaactgtttcataataatctcagttaaaagggcttagaaccattataccatccttggtataaagcggttatgcgagtaccgtctttaaccgttcttcaaacttccgaagagtattctggcgttcagctctttgctttttgtaagtttcaatacgctctgaaatgagagtgtatcgttcatttactgattctttcataaaatcaggaatttcacgagaagctttaatctcgtcaaatttatcaataacaacttgctcttcagcaattaagttatcatacatcaaaatatctttcttgatgaactcaatatcttcttgagttacacgagataatttagatgctttatcctttttgtactgttcgttagtatcacgagaccagtgtaatgtacgatttttattcgtattcttataaatttctacaataccaatctcatcgataataacgatccaattccaacgagatttataaacttgtcctccatcaaccgtgatttcaccaccgattgagacatcattaaagaacttgctttgagcttcagatttaaatttaccatcattgtagtttaccaagttgaaaatatctttagcattcattttctgttcctccgtagttgatagttgtataataccacagaggaacagtcttgtaaacaactaaaagaaacttctttcacaattttttccactgaaccaagcgctcactgctttcttagtctcaggagcagtgttatccataaaccattcaaaggcagcctttttatgattctggagggcttctcgggctttaatctgctcacggtctattaacactaacatatgagcctttcttgtcaccaaggacttcttataattcttggagtattcccagtcatttgtccaacacattgtcgttgcgaactgaaatactgcttctttaattttagtttcataaatttcacgagcctttgagtataacatcattacctccatttaccagtttaattctagtcatctttttaatggcagtccatataatctatttctgaactgcctttttgtcatagaaggcctcttatgaattatttcagaagagtaacctcagcaatttcttcccaaccatttttgtcggtcataataaagtcagcaagataaagagcagtacgcagtgaaacattgcgtaaacgattaacattgactttcatccatgataatgctttataagtttcttcatcagaaagaccgcgcttttgcatcatgtcagttgaaagaataacatcttcaaccctgaccataatttcttcattagtgtgaacacccaaatccaaataaactgagcgggacactaatgcttgtaaatgtggagcaagtttagtaccacggtctaattcgcggtcaatgtcaacgtttgtgataaaaacaatcgttcctttaaattcaaactcacgctcaatgcctttttcttctaagtaagaagatgcggtgctccagcagactttacgggtctctccagtgtccagagcagctttcagaagattaagaatgtccatatcagagaaaacatccacatcatcaatcaaaaggacagaattctcttcacgattattccaaagctgttcataaagaccgataccggagattttaccgttaatgcttttatattcaatgtatccaatatcatttgctttatttaaagctttatctaaagaatacgttttaccaatacccgccgcaccagagataattaatgaacgaatgtttccgttaataataccattcgtcatcattcccataacattaaatcttttattaatgcgggttttcatatcttcatatgattctttaacttcttcaacttttacaccatcatatgaaatgtctgatttgtaaacccaaacaccgcgacgtttaccgtcaatttcaacaaaaactttaccatctccttgcgcatctaccggagcattatctgggaaccattcgcctaagagctcaaaagttccagagatttctttgccaaagtagatacccttattgatagttacagttttcattttattctcctttgatttgataggactactataacatagtcctatcagtttgtatacttattttgacatttcttcgatgtcacgacgatacccgtcacgaacttcacgaagagcttcaaggccacacataggctcgataccagtaatgtgaacttgattaatctgatactctacatcttctaactgagcgaaaacataacgacgttcagctgcacaaccagatttagctttaccgaaacgtttattcaaagtagtcattttgtatctccaatttactcatttgttttgatagttgtatagtaccataaagctttatgcttgtaaacagttttgtgaaaaatttttgaaataaaaagggagcccgaaggctccctatcatttataataacttcggtggttttcaagatagaccttctcaaggaagtcatcccagaaactcatgtctactttttgctgcataccgttcttagaagcttcagtagatgctgcttctacttgatcgaccacatcttccaaaaactcttgaactgttttaaatggatgcttacccaacttcacgtcgagaataaatggagcatcttggagtggataaatcaagtcaccagttttgtaaatttccaatagttgaagtccaccacgacaagcatgactcagagctttccaatcaataccttcattagcttcggctttacgagcacgttcaccatattcagcatctaatttgttcagtgactgcttaagctcaataagagaaagtgttgtctgatatttacgacccaacacagtgtagaacgtttgcgggcctgttttctcgtgattatggaacacccattcacagaactcgttttcagggagtctgtgtttgatatcttctaccttagtacgacgaagtctatcagggattccttcttgatagtcgacccactggtcagggatttgattaactactttcaatacatcacgtaatgcggccaaacgagaacccttgacaccgtatttagaagcttgcttgcggacatatcctaaataggatttcatgttagttgtataaaaccgtgaacgattgtcttggataaatttccatacatcaggcaaatcagatttaaccactagttcaggcggagtgtgaagcatatccaatgctacagtttcaccatctgctgctaatttaaagaaatacttaagactgtatagttcatggtcaatatcatctttagtgtttttagatgatgtgttgttagtgtttttactcatatgctctttaacatttccgataagaatatcgcgagcacgaggaacaaagatttctttaaaatctacatcagattctggagtagaagttccataaagatgactaccaaaatagcttttcattactgttttcatcattcagccttatattcaataacaggacatactttagctttacgggcttttaaaaattcgacgataatagatttcttgggttgaataggaggtaaacctttatacgccctatcaatattttctacatgtaaagcataatcctttttccatttataatctttatatttttcatgcagttgtgcaggaataacaaatgaaccaataataagtaaaacaagcaaaatggcaagtataaatgccgatggaataagagtccataaactaccaaaaataagccatttctgtatgatttctgcgcagataatagttagacctgcgagtatagtacatccgaaaaaagaaacgaaaaatgtagggataacaatagaccaaaagtatgcacacagtgtcttaggtcgtttccattcgtcgttaaacagtttgaataatttatagtgccaagagttttcattaataatcataattatcctttcattgaaggtgtaacagttgttaaatacttaatcatagcttcagcttctgattttgataatgaaatttctccattgttttgacgaatagaaataaaatccggatgacggtcaccaccagcttttaaaatacacatataagtatcagtttcatcttcaatatctgaaatgattgaagcagttccgcatgaatgtggtttttgataaatcaatgcagcttttcttccaccgtttgactgttcataaacttttaacacatcaaacaaatcacttcttttatcaatagctaagatgttgttttcatcttcaatgttaaatccttcggatacttcataaagtgtcacccataaatcaccgatgtcaataacagcatttccttttccacgactttcaagaatatgacaaattttcttgatttcgtcataactcattttaataatatcatctccttgaataaggaagatgtcatttttaaatttaacgcgaattaaaccacttccacttgaaataaacatatttcctcactttgaaatcatagttggaatgacagaatcaagataagtctttagcgcaatggcttcgtctttggtaaatgtgacaatatgtgatcgaaaatcgtcaatttggcgaatagttaagacatctccctcttcataacattttgatacatttaaaagagtttcatcattctgattgcaatcgttagtaataatagcattgcaatttttgagccattttaaactatgttttctttcattagaataataaaaatatttaatcttagctataaaactatcccaatgaataactgataaacacattgactcacttttaatattaaatcctgagcatgaagaataaaaatgaattttgtgctcatcattgatgcttactattttatcagtataaggatattcaatttgggttaaatgaatgatttcactaggcgtaaaatacagcatatcgtcttcttgcgtcaaacgatacatgttatttactttttctatagccaattcaccaaaaagcggactaacttctaatactaatcgtttcatattgattctcttcgactcactcataattacatactcctctgaatcatatcaataatgttgttcaccagattataagtaaacattgggtaaaattatattgaatcaccacatacacaacaaacaaaactttcattctcttctccttggcagttgacaagattactataccataaccttgccaacttgtaaaccattaaatgacgttttcaataaaattttgaagctttgtgtgagcatcaaccatgattttcatttcttctttggcgaaagctgtacctctttcccgagaagaacattcatagtcagaaactgcattagcatattcttcaattagtttcattaaaaacatctgcttttcagttttcattattccacctaatcatttcaagatattgaactaacttagctttggatttatccaaatcctttttagctgcttctataccatcgtacgaatatccttcacaatgctcaactgccaattggtatgaatctatttcaatatcacgtgctaatttaatgatcttttcaaactgttcacgtgttagcatacttaaactctcgtattatgatcgataatttcatcaagaaacatatctaaagcttctacagcattatcaactttagcttcaaattcttcagcgcctttatttgcaatgcctgacgaaaaccaagcaaagtcactaagttcctcatctgctttgcgaattaaagctaccaattctttaattttatctgcttgttcgatactaatcattattccaccacatatgaaagagagaatattgcacacgccatatgagttgcagcttcatcacacatatcataacgtttcttaagaagttctacaagttcttcactagtaacttcatccatgtcgacgaaaaaatcaccattaatgatgacgtagatatttccttcttgattaagtgcttcaattttcatgatgttctcctctttatccgatggttgtatagtaccacggctcaaacgaaaagtaaaccggtaaaatgaaaaaagtctcccgaaggagactaatgttattcgagggaaagaagatacttactttggtaaaacattccagtaatatcatctatcgtgctttggatggctggaggcatttctttataaatgctgttagattggtctagtatgcgatcaatcattttaattgtgtcggtaggaagtttactagcatctggaattgaaggtgtgtattttctaccagaataccccaaatactgctcaccaaatttgtcaatcaaatctggcaactcggagaaaataaaatcgtatgctttgtgtctagcataacttttagtttcaaaatgtgcagaatgaaaataagcttgtgcagccattaataaacctaagtattcatctgcctttgaaggttttccactttgtgaaaagtcgctgaatttcattcagtctccaatttaatgttcataattctagcgtatgattgtgccatctccgcgcctcgttctatacattcaaaatcagaagagcacgggtcatttttataggtcgttctcataaaactatagaactgttcagatgattctacgcttttattttcaaaaagcatataaacatgtctaataccagattccataaatttatcaaaatgaggatcgacattcgcttcaatcgatggagataaaacaaatgacaatcctagcatggcaaaaagtgccgttgcttttaaggccataaaggcctcctatcatttttgtcctgtatttactttatgccgatgcacggccttaactttatcaaggtatttttcaaaatttcgcaatctagtatagtctgccggagattggttgagtgatacttctcgacgcaaagctgaaatgatatttccaacttccctacgaatttcatctaattgaagcacagtaagattgcgaagttgcttttcagttaattgtagcatatatacccctttagttagataaaaacctatttataacttttgcactaaccgagctttttagttaattcattccaatgttttctacacaaagaaacataaatttcatcaccaatacagatttgattaccttctttaactggtgttccatcttccattaatcgagctgtcataatcgcttttttaccgcaatgacaaactgcctttagttcaataagtttatctgcaatcgctaaaagttctttagaaccttcaaataattttccagcgaaatcagtccttaatccataagccataacaggaacattatatgtatcaacaattcggctcaattgatgcacttgttcagtttttaaaaactgagcttcatctacaaatacgcaatgaatatctttttgtgcttcagcccatttatagaactcgaaaatatccatatcatctgtaataatattcgcttcctgcttaattccaatgcgagaaacgacttcacagacagaatcgcgagtatcaatagcgggtttaagaactaatacactcattccacgttctttataattatgtgcggcagtcaaaagagaagcagattttccagcattcattgctgcataagtaaaaattaaactcgccatatcaccttcttaaagcgtattcacataagctattaattcattttctttcttatcaaaccgatcagcaaattcttcctgctgttcgggagataacgggccgtattcatcataaaaggtgtttgcttctgtatgctcatctagaagttcatggataagctcaaacaatttatctttttgttctttactcagactcatatattaatttccaggagttttaaaataattcgcttttgcttaaatatttccacagttaaatgatcagtatctttttgaccgattccaatggcaaaacctttattaacagcgagttcaattaaattatcaagttcacgtaacacttcatattgtagctcaaaactattcattttggtttaccttctttaacgaaatcaggataaggataaaatcctgaataaaatccttcacctttatgattgatacatcctttattagaacaatagcaccaataatcgaaatcacaagccatttcatcattacataaagcaaaaacaaccggccattcacacttttcgcagtgggcatttttaagaatactagtttggctcataaccatgtaacctttaagcaatattcttctacgtgctgtttacgacctttcttgtcaataaaggtatattcaacgaatgttccaatatagtctttatttacatcatgtggactattaattgggcatttagtgcggcaaatgcgttcccattgacgaataatttccactttgtttttaggatcaaacggatgcgggtaatgtactttcataatccaccactattaaatcaatatcaggagtaaacatgtcgattaatttagaaaccttatcccaatcaccaccagcaataccgcaacctatgcgtggaatgtaaattactggtttaaacaaaagggtttctgcctgtagatttaattctatcatgcagtttactaaagcaccataatcaagattaggacccggttcgtattgcgtatacaaattatagcacatactaaatcctgtaggattatgtttaaaaacaatagacatatcgcctaatttatcacgagaaccgtactcggtagtggttttatctatttctaaaattttgggataggctcttgctaattgaccagctacaccactgcccattgtatgaaaacagttacacccgtgtgcaataatattaccttgaagaaatagggcgacaatatcgcccttgatatattttacaatcatctagtactcaatcctcgattataagaatctaccaaacggtcaaccattgaatgacaagcggctttatctttctcctccgcaactgaacattctaaggtattccactttttagcatatcgttttaacaatgtatcatttttgtatctgcttgatttatctctttctccgtctttatatgcatatattaatttctgcgcaaattcagcttgacatgctttatttttcccgcaataatccgctgcagtacggtttacatactctctaatttcagtatatgatgtatctgctaacgcagaaaatgaaattaatcctatacataaaaccaaaattttagtcatttactatttccaaaagtttattatttttaaggtaattagccttttctaggacttcagaagcatatttagaacctgctttaacattccatcccgaattataagaggatattgcttttcttatatcgctcttatgtatatttaaccaataagaaagttcaatgtacgcccaggaagctgaattggaccgtttattcaacattctttttatttcagcatcggtcatattataaccaagttccttaactcttgctcgcatagtaggcaaataattttggaacattccgtaggcgtgatgctttggtttagattttaaattaactccgccagagctttcttgccataaaatagcagccattatatgacctaatccgctcttgtggatatttttgtgtgttttatattttccatccttagaaaattgttccccgaattgatacgcgtaacgcatgttatcgagttggacattactgaaagtatgctcggagctatgtgccatcattgaaatggccaatagaccagcgagtagtgcttttctcatgcttacctcattgagttttaattactgctttagaagcctttcctggtaaacgacgactgttgataattgccatcctgcattgaagtgacgggtttttgaacttctcattaggcttacaaaccgtaaatccaagccaaagatttccatctgtgatttctaaacgtccaggacgatattcaaccccatcaataaaatcctcgtcaatgtcaggacgcggaggcatactcaggaattcattaacttctaaaacatggtcttttattttatggaataattcaaaaacatatgtctcatcaatctcccgttgaattgcacgatcaagaagatgctgagaatattttagatgaaacgatgagacccctgctgcttttgatgcctcacgaatctcattgttaatttgacgaaactccgactcaaagtgacgacgaagcttatttcgacggataaaaacttctgtattgatagtcatgttattctcctcttaactgatagaaaaattataccacagtcaagaggaaaagtaaacagttattctttaaatctaatcaatttattcatagactttgaaacttctgcacgaacctcatgtaagtttttaagctgttcaagacgctgctcatagtaagcaatttcatcttcttcgagacagtcctgtgaatcttctttaagataacgtgcatagtcctgaaaagctttacggactacttcctggaagtcatcaagactttgaattttcttaggagcggcagatacacgacgaggtgcagtataatactcataaccaaaccctgcacttaattgagccattagtatttttcctctggttggaacactgcacgacaagcccacatactggcttctttgagtttcgttttagcaataattaactgatcgaggctttcagcgtaattcttcgcgagttcatcatcttcacagctatcaaatgcttcccaaaattcatcgtataaagcatcaaagataagtcctaaacgaacttcagcgtctttaatagcatttactttaccgattttttcgtcggtatgcggcttataacctttaatatcttcaatcatatttgacttcctcaccagtgcataaatcatattcaactaaacgaataggttcatgaatgccatatccttgaacagaaatttctgtcgtaggataaattccatcaatatcacccatattccaggcttcattaaattgctgttcgcctgaattactaaaccactcggcgaaagcatttagcacatctttagaaccttcaataattatctttgccattacaaactctcggtgaaggtacgagcgataacgtcgcgctgctgttccggagtcagagagttaaagcgaactgcataacctgatacacggatggtcagctgcggatatttttccggatgcttaactgcatcttccagagtttcacgacgcagaacgttaacattcaggtgttgaccaccttcaattttaaccgtaggctgtggttcaatttcaatttcacgggcatgcaaaccgtagaaaatttccgggtctacaaaagagtcctctttaaaggttttagagacaataattcgtgcttgaataccatcttcaaaataaatagtacctttatgcgtgccttcaagaatttgatatgctttcatataacctcaattagaaaataaatttatccaagattgttctttaattaaaaatggctcagaatcatatgccattaaactttgggtgattagtcctttaaaaggtccatcaataaattccatggtaaaatatggaattttattcattaactgcgcgttaggagcagtgcacaaaactctgcatcctttgaatacgcctttttgtaatttgtattgcttgggataaaattcgctcaaaatgttattatttgccaaaatttcaaaatgattcaccaatttatttttaatagtttttggcgaaaaataaagatattcgaaaagctgcgtgtctgtcatcattgcattccgattatgaaaaactgtggacgagtaataccaccaatgcaacatttactattgcagcagtgttgcacagtttcaatatgaatatcgtaaattttatccatatcaggagatttaacaggctcatcgattatatacaaaatccgcgaaagcgataaacctctgaacttgcttcctttattaccgataaaactacggacagaatcggtaaataaacggaatcgaatatcatcgctagaataacgagaaaattcttttttaatgtggcctgcagaaattttagcgtaagctgaagtattagaaagaacaataactgttccaccatcatacagccaattagcagcaaagttagtcacagcaattgatttaccggattgacgtccaccatctaatcgaagtgtgcagtactgtttgagcatatcttccattggtggaagataatcattcttacaaatttcttctactctagcatcagaatggtgtgtaaaagcattcatcagggatagataaggaccagttaaaaatgttctcattttattctctctaagtttgggccattccgtggcgcatgaattgtccatttctgtatttacccattaccgcacttgggctcgaccttattacaggttggcgggaatccctcatagaatcatgaggtccagcttgttcccatatttcttatttgcttatttgaatgatttgacgtactgaacagaacctttactattcacgaaagcgattttaccatttttgttatacatggtagcagtacgctgataaccataagtttgtttaccagattgataaccaactaatgcaaaattatcttcacccattttattctgtttagcgcgaatgcgttcatgaccatgtgccataagaaccttagcatcaccagttgcaatggatcgacgagttttttcatcttcaactgcattaacaaagtcgtcaaatgaatcaaatttagcatgagatttattatacagttttccatctactgcataattatatccttgtacatccatctcaacttctgtaccatcatccaatacagcagtgattttttgaccttttttaaatttcaaaagatcagtaaaagattcagcaataatttgagaattaatagctgcttcagtgataaattcttgatatgttttcatgggtttcctttaatttttattctttaggaaaatttttagaatatgcgtcgtaaagcttatttccaatacgacgaaaaactctagctgcaaaacgattttctgggtttttaatcatgatttgcatcatataagtacccgcgtcagaaagagcttcttcatagtacccgttaatttctttaagagtcctacgtttaccgccaggaccatcaacagtgattttccatttacctgtagaagtgcgacttggcggctcaacttgttcaatccagatataaccgccttctacacgttgtcctgcggcagattctgcaataaattctttatacgttttcatatgtttcctttaaatgtaaatatttttgccgtaatacttgtaccagtgtggcttcattaaaattttttcatcgagtcgttgttgactcaatttaatagctgatttgcatggattataatcatttttccattctgctggaatatcactgatgtcaggaacttcagtatcttttatactaaacccacgttttaagcattccgttataatgtctgattgacgctttcgcaaaaattctaacttatcgtaaaagaacgtaacatgaccagaacctaaaataaactcggaagatattttaaaatctttaacccgcttaccatttgccacgtgtttacgaactataccaaaaacacgtggcaattcacggtattctgcgattaaatgctgatcagcaagttcagatactaaagtcaaattaatacgagtcattttatccctccaagtaactgtgaatatactatcacagttctaggagaaagtaaacaactttatagatttttatacgcgtcccacgtaccagttctaaacgtggcaatgactcgttttgcacggttaggtgtttgattataccatctacttttagctaagttaactgctgcttcatcccagcgtttttgttgaagcatacgtaaagaattagtaaatcctgctacgccggtttctcccatttggaagaccatgttaatcaatgcgcaacggcgaacagcatcaagagaatcataaactggttttaatttagcatttctcagaattccgcgaacagcagcatcaacatcctgattaaagagtttttcagcctcatcttttgtaattacaccattgcaattacgcccaatagctttatctaattcagatttagcaacacttagtgatggacttttagtaagcaaatgaccaatgccaatagtgtaatagccttctgtgtctttatagattttaagtctaagaccttcatctatacgtaacatttcaaatatattcataatacctcctaagtatttatagaaggtatttataaaattaaaagaggttgttcattattcggtaaagtgaaggacccatcacatattgccactgagtacgaggaataagagcaaaagcatccatctctggaatcataacgccatctttattttcaaaataagactcacaatggcaatttctgaacatctcatgctctactggaatcgtataataaaataactgtaagtctttattactagaatatttaaatacacctaggtcttctagaaggtctggattataattgctaaaaccggtctcttctaagcattctctttttgcagcttccagtgcattcaaatcagaactttctacacgcccctttggaatatcccaacgatgtgccatcattccagacttacgagaaccagtaactcgtcccataaataaatctttatcttctgtcataaagataataccagctgataatgttttcattttaatttcctgcattcagtgataaaattatttaaattttgagtatatttcttttcatcaaaaatcttttgctgtctacgtaaccgccatggcatttcaatgaacacgcaccatattcctgatagtactgctgctgtaaaaatattaacaagtataattaaaagaatccaatcttccgttctgcctactggactttctccaaagaagcaaaatacaaatgatgtcacaggaaaactaataatataccacagaataaccttcttatctgtgaaccaatcagcgttcgttaacttagcacgaccattttgaatacacacgaatttatcatctgttacagtagatggcttaactgcttgatatcccattctaaactccctaattaatcgtttctttgtatcttcagaacagccgctccagtcaactctatcgactgaaatgccatcgtccccatcatctaaatcataccagcgagtttttaaaatcatttgattttcctacaatcattcacgaattctttcattgattcattttcaatataagacatgtagttattatattcttttaattgtattttgtaatccttttttctttgccaatttattttaaaattatcataatgaaaatataaaatgatactaaagaatgaaaataatgaaattgctatagtataatgaagttcactccaaacttctattatatctactataccgctgacgttactgcggatgtttaaaataatacagtcaatcattaatccaataagactaccagcaagagctgcagccaacgccacagcaaaaattaaaaatgactcagaaaaagaatatttgactttatttagttttggcttttgcatcgtgattccttaacaaatttcataatttcattaaattcatacatatttagtttaagctggtgttcctttttaatctttttacactgagctttccattcacgtacacgtttacgataatgccttccttgataccaatatcctacccaatttacaggtaccaataaaaatggaactactaatggaagaattaatactaacaaaaatattacgccagattcaatatcagtcataaagtctataaccattccaacaatcaatagaattacaaatgatatagctgtcacaggacctattaatacatcagtaggaattagctgacgctttagttcatacttcacaggttcacttggaaggtatagtgatggctttgacatattctctacattccttaacaaatttttctaataataaatcgctttcaaaattaggattttctacgaatttatcaaaaagatcatcaacaatagttaagatattctttttactaagaatacgtttattttcatgctttgtttcagaatcaactataagagtaaagaaatatttcttgccctgaaattttacagtagtatcaatatagaataaatttgacttttgtaaattacgtttaaaccatgcatcacttaaactataaacgccaagataatcataatcgtcgtttaaataacagaccgtccattcaggagaaacaaaatcagtaaattcaacgtcaaaatcgcatgttaatgaatgaattgattcaatactgttaataagtattccaggacgtattaaagactttttacctttataaaatccagaaagactttcatcagtttcatatgaagaaccccaataataattacgtccttctgccatacgtttaagagcatttaataattggtccggaacatcaactcgtctttggaactcttcaaacattgaattgaaatcactttgcattttcattcctacttactccaagtaataggggccgaagccccttatcattatttcagagaattaatatattcctgaacatcggcagaggtagtttcaaccccagaaatattgccattaaaggtttcaactcgagcaagagtatcttcaatatcaaccttagtcagtgctgcaatttcaactacatcatcagcagtactaattccgagggcattcgcggcgcgagtttcacggatatattccaatttaactgcaagttcttggcgagcatcatctaactcaactactttcttggcgatttcaattcgcatttcagcataaccatcagctttagtagtcaactgctcagctgttcgacgatatagtaaaccaagtttagcatgcattgttacatcttgaccttccgaaagaagcttgcgaatttcacgctcttttgattcggcctgcttattcttttcgacaataagttcacgaatacgcttttcttcattaatagatttaacagaagcagtttttagatctttaattttatcaagtagttttgctgctgcggcaggcagtatactgttcttcaacagataaatttttagccatagcagaaccaagtttagtgcgaataaactcaacaattttcttcagtgtgttcatagtatttccttaggttgattaagatttaaaatccgtgagagtattatactccggatagtttataaactatttcaacatcgccttttgctgctttataaccttcagcccaagatataaccgagtttttatccgaagattcaaattctggcattgggctttcgccaatgttcacgcagtatgtttcttcattttcgtcaaaccaaataattaaagtagtcatttatttctccgtttctgtatttgttttgataagtctataataacaccgtccttggtgtttgtacacaattatttcatattattgaaatattcttctgcgatttcatcgttatcatggtaaactttagaagacagtttaacataaccttcagcagtgaacatattaatcacaacctttacagtataccactgaccatcttcattacccattactgcataggtttcaaacatcggatggtcaggaccgataactttaatatcattcactgtacgaccgaaatcttctgaaacacatttcataaagaagttgaacagctcaccgtaattatccatttcattctccaagttgttttctgtatcagtagttgatagttgtatagtaccatggaaggacaaggatgtaaacagttttgtgaaaaaatttttaaaaagttttggggaattctagggcagggaggggaaatcaaaggataggataatatattataaagggtagaaactaaacgatgtctagagaggcctggaaaggcctagatatcaaaaagccccaacctttcggctggggctaagccttgcggcaaccttgtcggggttccacctgctaaggcaagtgtttgtacgaaacgccgggattcgaacccggttatcaagcagttgacgctactcaatatttttaaaaggccatatctcgaccatatccgaacgttccgtcaaaaacgctactcggcttacggcaaagatatttcctcgaatcgataattcggtgcgccgtttctgctgtgatataaggggacattaacaaaacataaagatttattaatgccagtccttaaacagggaacatcagtccgacgacttaccggtagcgacccggtttcttaatattcttttaaagcatcaatctgttcacggcgtttacgccataaatcaattgcttcatacgcagattcagcatttcgaattagccggcatttatgtaaagacttatgattttgatattgtgtagataatggaattgtatctaaaaggtctttacgatcaaagtattcgtaaccatctaaaccaaatgaacgatttttgagaaattgccaatggccaaattcattttcaacataaacataatctgcatgctgataaagtaaattaattacacgttcagaaatagcagtatcattatgattaaaatagaatgttaaatcatgaactactaaataaacattacctttcatattttcctcacttataattggtcgaggcagtagggatcgaacctacgacctaggacttagaaggtccttgctcttccttctgagctatgccccgtaattggggtgaccgatgggagtcgaacccatgactacgagaatcacaatctcgagttctaccaactgaactacggccacattaatatctactccaacaatcatgatgtcttcacacgaaattaagagaagagtgatcagttcaacccctataatcgcgtcaagtagatattaatgtgacagttgtcacaaatttggcggacgtgataggattcgaacctataaccaatcgcttaacaggcgatcgctctgccattgagctacacatccaaattggtggggagtgatggagtcgaaccacccgagtcgcaatgacaatggatttacagtccacaccgctacctctacgggataactccccttaatttggtggccctgggtggaattgaaccaccatctggcgattatgagtcgcttgcttgaaccttccagctacagggccttggtgctgattgacggaatcgaaccgccgaccttctcattacaagtgagttgctctacctattgagctaaatcagcaaaactggcggaggcgataggatttgaacctatgagtcgccggagcgactgccggttttcaagaccggtgcattaaaccactctgccacgcctccagtctccatacaaggatttgaaccttggacctcctgatcccaaatcaggcgctctaccaaactgagctacacggagtaaattaaattggagcggataatgagaatcgaactcacatcatcagattggaagtctgaggtaataccattatacgatatccgcaaatttggtgcgagaagtgggactcgaacccacaaggaaatcattccgcagcattttaagtgctgtgcctttaccaatttgaccattctcgcgctgggaataaaggactcgaacctttgcatcctggaatcaaaatccagtgccttaccaacttggctaattcccaattattaacaaaggctctcaaataagaacccttgatgatagagggtattaatcagtgcggtatgagttaataataacaaataattcttaaagcaaattaaacatcttaacggtcggcaaaacaatttcttcttctatataagagtatttaacactctcaactacacgcaaaaaatcataatcataatactcagaagcattacctaaaatattaataagtccttcaagcactttattaccattcacaaagaataagtcaaatacacgttcttcgtcttcttcggatttattaccaaggtcaacttctatgtcaaagacctttttaatgaattctggataaagttgttctgagaacagtccttcaaccaagtattcataaataaaaagcgattgctcactgaacaagccattaccacaataacgttcagctttagtactagaatgtctgcttttaaacttctttaaaagatattggaattgtaagatttcatgctcttctacgccaaacagtgttttagttttatagttgtcaccatcattttcccaggtagtgacatcaattacgtaaccctgtggaattgtagtacctaaacaaatattcattttcaccacgctgcattaatatacgttttctgaatacattcaagacccaaaggattcttgaaaatatcatattcaagaggacctttttctgtttcaataaagaaatcaaaatttactgtattaaatttatggtcttccttcactaatttaacttgagaagatgaacggtcaacataaaccttttcaacttcaaaacatgttaaaacaccataatcatcaatcaaggctttagccgcgtcttgatcatatttatatccattttcaattgatgatactttagcataaagaatcattatttacccttcatcaacaatagtatgagtgtgggcatttacaatttgccaccaatcaaagcgattagaaccatacattggtttgttctcattttctttgataatgtcacggagttcatcttcggtagctgctttcgcgattaaatcagcatatccaccacgaggataataattatcacctgcaaaaagtaaaaagtttggtttaatattattaaactcttcaagagtaataactgttccgccaggttgaacaatatctacataactatatcctaatttttgagcagcatctactgcttcaagcagggtatcatgagcccatccaatttggcaatctggcttttcagatggattagcctgataatccgcgtacactttatacattctattcacctttagaaattttatccataacgatagcgattaaaccaattaaaaatgctactacaagcgaaaacacattttctgctgtagttaataatccgcatataaatccaacaaacattgaaaaactaaaagcggaagcagaaattgcaatagcaacatttcgaattaattcacagcgtttcattttattctccaatttcacatttgttttgatagaactactataacatagttctatcaagttgtaaactattatagaagattttttgcaataattttaagctgagctactgaaatatgcttggctttaaacaaagcagtttcttcagcaggggagataacgattgtagcaccatctttcttagcggaccatccatcacccaggtaaacagtacctttgacttcttcgccatcaaccaggctaatcatcggtttaccttcacgtcctttgtttgctttaataacttcagaagtaagggtcgcttcagtcagggtagaagcgctagtcgttgaagtgaattcttgataagttttcattttatttttcctaattaattttgatgaggtaatagtatcactacctcatcagcatgtaaacaactttgtgaaattattttaaatcatctgcccaatcaagcttaagaggttctttgtattcacgatctaatacgaccggaatttgtacatcaccgctaaatgataagggcccaacattataagacaatgttatatgcggtgtgtaatcatcaaaatcatgtgtagcacctagtgcccgcgcatacatgtgtcgacaacgcagatattcagaatctagtacaagtacaagagtagatccatcttgtgttttccatacttctaaatgcccagaagaagctacttcaaaacttccgcttgatggaacatacggaacatttactctcgaataacatatagtcgaatgaattttttctctaggaactggattaggaacacgtaaagagcgctgaagttcttccagcgcatcaagtgttaattctgaaaacttagctgctacataaagacccgttgaaaagtctttaaattccattattcttcatcttttgcttcatctgcagattcagcagtaagattcttgacagcttcaacgatttcttcaactttaatagtatcgccagtgatacctactgcacgagcaatttcagccaaagttccttgcagaattttagattcttccatcagacgagccgcttggtcctgcgtatcaagaatgcgagatttcagagttacgatttcagcagacagtttttgttcaatagtttgttcagacattatagtacctttagtgtatttttaattttagaaaaaagttcttcaagagaaccatcgtttgtaattactaaatcgccatcacgaattggcaatccagcttctgtaatatgagtatcattggatttttgaccaggacgaactacatgaattactgtagcacccatcgccctagccgcatccatttcatgatcttgacgagtatcaggaacgatataataatcataacctgagttaaatttatcaagataatctaaagcaaataattttacccaatacatgcggtcgaagttattaacaatcaaatccgtacctagggcttgcatcagacgacggactgaccattgatcttcaatattatttataacgtcagcaatcttgttaaatgctacgaaattaactgcgtcatcaaaaacaaacacacctttaattgggcttttactattaagatagcaaaatgcttgttccataatcgtaattacttctaatttagtcagatttaaattagtttcacgatcatagtcaattccttcaaactctttacgagttaagcaaggatagtcagtgtttgctgcaaatactccccatgcataagccaatgcatccttaataggaccagcaagttggtatttaactgcagaataattgctcatgataaaatcagcagtagtatcttttccactacgctttacaccgcttaaaaagattagtttcatgtgtttctcctcaaatttaattaagattataacacacaaaactgaagcattaaacttctgctataatttttccatctttttctacttgaaaatacgtataaggaatcgttgctgtgcatactaaggctgggtctgaatcttctgtgtagctaaattctacttcagacaggtcagaaacccagggcttataaaaatttattgacatcacgatttcagttttactattatctaaaatgtaaagcgtaatgtattcaggacctgttttttgggcagtattttcgcctgtaagatagttactagttcctagcatccattcatacattcctatccatgacttaagctcttcatcaactataaatctcacaatgagtggatcatactcaaatgtaacacctggacgttgtgctctacccagtccaaacggcccagtcacggtatcagtaacaggtattctaattcctggaataggaactgactgagcatttaaagtaaaagcagatgtagtattactatgtggtattgatactacaaagttagttgtatttgcttggttaaaaatttgttgcagagcttgcgacatatattcctcataatgctttataactgttggtggtataatggatctaagtcccttccattcaattccatttagaacaaacaacagaaaagaatggaagataatagaattagatatttgaccagactttgtttgcagagaaacgttttccttttgaaacgaactgctgaagtggcattaacacaacgttcgcccagtctttcggggcgatttcaacaaggctacccataatattaccgggtatatatgccttaatcatttggtctgcacccctaaatcctttcacttgactccaatcaatttttaatttcgttttattagtaatagtaggtgtatttgcatattgctttaaaagctcttctagaaattgctgacgagctttaggtggaatatagtgcaggtttaatccgtacattaaattatgcttacctaaaccaaggtaaattatcaaaggaaatttatcccagtaaggaagagtttccttgtgtttagcatcataagcaaaagcatatattcgtcccggctgcgggcgaacaactttatgtccttttacttgcttaatagtttcagcaaaccattttctggttttattattaattgctgcaccttcattacgaattttatcgcgcaatgtttgtctgaatgaatttatcataagcaattgtctttcttgcttatttagcttgttcattggttttgattcaagcttttgaatcttttcagctgttttaattcctgaagcatattttgacattgccgaagtaaacgtagagtatttgattcctctttcttcagcaaattgctttcctgccattccttttgctttggcctttttatattcaagacctatctgaatccatttcttttcgtttaatgattgcttaacctttggaacttggggagtgctttcattaattatttgaaaaatagccattatgcccccttaaagccaagagctcgtaatccatcttctgttagaattctaaattttattccacgcttttcagctaaagcttgcgctgctttccatttatcggtgttaacagaatatgtataaatttcattcataaatcttttcttcgctgcagttgttagatgtgctggtttaactggtggttgtgtttcttttttaggctttatttcaataaaaaattcttgtccagaagaatctttcatccaaatatccatgaagtatctacgttttttcccttctgcattacaaaaataaggaattactgctgtttcactaccccatgcaataatttctggatttttatctaaccattcaaaaaagaatttttcccaatttgatctatacgtaatttttttagggtcacctctatactttgatatatttttaggaacccattttccagaatatgccattggattctccttataaatagataatatatttataaacaggagggcccatgctctttacattttttgatccgattgaatatgcggccaaaacggtgaataaaaacgcgccgactattcctatgacagatatttttagaaactataaagactatttcaaacgtgctcttgcgggataccgcttacgtacttattatattaaaggttcaccacgcccggaagaattagcaaatactatatatggaaatccgcagttgtattgggttttattgatgtgtaatgataattatgatccgtattatggatggattacttcacaagaagctgcttatcaagcatctatacaaaaatacaaaaacgtaggtggagaccaaatagtatatcatgtgaatgagaacggtgaaaaattttataatttagtatcatacgatgataatccatatgtttggtatgacaaaggtgataaagctagaaaatatcctcaatatgaaggagcacttgctgcggtcgatacgtatgaagctgctgttcttgaaaatgaaaaacttcgtcaaataaaaataatagcaaaatcagacattaattcatttatgaacgaccttatacgtataatggagaaatcttatggaaatgataagtaataacctcaattggtttgttggtgttgttgaagatagaatggacccattgaaattaggtcgtgttcgtgttcgtgtggttggtttgcatccacctcaaagagcacaaggtgatgtaatgggtattccaactgaaaaattaccatggatgtcagttattcaacctataacttctgcagcaatgtcaggaattggaggttctgttactggaccggtagaaggaactagagtttatggtcattttttggacaaatggaaaactaacggaattgtccttggcacgtatggtggaatagttcgcgaaaaaccgaatagacttgaaggattttctgacccaactgggcaatatcctagacgtttaggaaatgatactaacgtactaaaccaaggcggagaagtaggatatgattcgtcttctaacgttatccaagatagtaacttagacactgcaataaatcctgatgatagaccactatcagagattccaactgatgataatccaaatatgtcaatggctgaaatgcttcgccgtgatgaaggattaagactaaaagtttattgggataccgaaggatatccgacaattggaattggtcatcttatcatgaagcagccagttcgtgatatggctcaaattaataaagttttatcaaaacaagttggtcgtgaaattactggaaacccaggttctattacaatggaagaggcgacgactttatttgagcgtgatttggctgatatgcaacgtgacattaaatcacattctaaagtaggaccagtctggcaagctgtcaatcgttctcgtcaaatggcattagaaaatatggcatttcagatgggtgttggcggtgtagctaaatttaacacaatgttaactgctatgttagcaggagattgggaaaaagcatataaagccggtcgtgattcattgtggtatcaacaaacaaaaggccgtgcatcccgtgttaccatgattattcttacggggaatttggaatcatatggtgttgaagtgaaaactccagctaggtctttatcggcaatggctgcgactgtagctaaatcttctgaccctgctgaccctcctattccaaatgattcaagaattttattcaaagaaccagtttcttcatataaaggcgaatatccttatgtgcatacaatggaaactgaaagtgggcatattcaggaatttgatgatacccctgggcaagaacgatatagattagttcatccaactggaacttatgaagaagtatcaccgtcagggagaagaacaagaaaaactgttgataatttgtatgatataacaaatgctgatggtaattttttggtagccggcgataaaaagactaacgtcggtggatcagaaatttattacaacatggataatcgtcttcaccaaatagatggaagcaatacaatatttgtacgtggcgatgaaactaagacagttgaaggtaatggaactatcctagttaaaggtaatgttactattgtagttgaaggtaatgctgacattacagttaaaggagatgctaccactttagttgaaggaaatcagactaatacagtaaatggaaatctttcttggaaagttgctgggacagttgattgggacgttggtggcgattggacagaaaaaatggcatctatgagttctatttcatctggtcaatacgcaattgatggatcgaggattgacattggctaatatacttccaatgagcactgatttaggagaatccatggaaggttcttctatcgacgtcacctttaccgctcaattagaaacaggtgaaacgttagtatctataaatataactagttacgaagaaactcctggggttttagtagaagaaaatcgtttatatggaacgtatgaatctgtatttggatttggaaatgatgcgttgaaatatcgtttagataatgaatttaaaaccgctgcttcatgggaagaccttccaactgattctaatactcagttatatttatggaaagctcctcaaaacctccagaagacattcacttacgaagtaacattaatatatgactaccaagaacaaggtgaatctggaggttctggcagtaattctaggtcatcttctgatactactgaaccaacgaatcctccagctccaataagaaaaactcttgttaaaaattacacaaaaactatagttggaaattggagtcgttgggctaataaattgagaagctatgtgtatgagaggccataaatgtcaggattaagttatgataagtgtgttactgccggccatgaagcatggcctccaacagttgtgaatgctacgcaaagtaaagtattcactggaggaattgctgttctcgtagcaggtgatccaattacagaacatacagaaattaaaaagccatatgaaacacatggcggagtgacacaacctagaacttctaaggtatatgtcactggaaagaaagctgttcaaatggctgatccaatatcatgcggtgatactgtggctcaggcatcatctaaagtattcattaaataggatttaaaatggcaaatacccctgtaaattatcaattaacaagaacagcaaatgctattcccgagatattcgtcgggggtacatttgctgaaataaaacaaaacctcattgaatggcttaatggccaaaatgaatttttggattatgattttgaaggctcaagattaaacgttctgtgcgaccttttggcttataatacattgtacattcagcagtttggtaatgctgccttgtatgaaagctttatgcgtactgctaatttgcgtagttcagtagttcaagctgcacaagataatggatatttacctacttcaaaatcagctgctcaaactgaaattatgctaacttgtacagatgcattgaatagaaattacattactattcctcgtggtactcgctttttagcatatgcaaaagatacttccgttaatccttataactttgtatctaccgaagatgttattgctattcgcgataaaaataaccaatattttccgcgtttaaaattagcccaggggcgtatagtaagaactgaaatcatttatgataaattaacacctattatcatttatgacaaaaatatagatagaaaccaagttaaactgtacgttgatggagcagaatggattaactggacaagaaagtcaatggttcatgctggttctacatcaacaatttactacatgcgtgaaactattgatggaaatactgagttttattttggtgaaggcgagatttctgttaatgtggcagaaggagcattgactgctaattatattggaggtcttaagcctacccagaactctacgattgttattgagtacatcagtactaacggtgcagatgcgaatggcgcagtcggattttcatacgcagatacattaacaaatataactgtcatcaatattaatgaaaatccaaacgatgacccagattttgttggggcagatggcggcggtgatccagaagatattgaacgtattcgcgaattgggtactattaaacgcgaaacccagcaacgctgcgtaactgcgactgactatgatacattcgtttcagagagatttggttctattattcaagcagttcagacgttcactgattctactaaacctggttatgcatttattgctgctaaacctaaatcagggctatatttaacgactgtacagcgcgaagatattaaaaattatctcaaagactataatttagctcctattacgccatcaattatttctcctaattatctttttattaagactaatttaaaagtcacatatgctttaaataagctgcaagaatccgaacagtggctcgaaggtcaaataattgataaaattgatcgttattataccgaagatgtagaaatttttaactcatctttcgctaaatctaagatgttgacatatgtagatgatgcagatcattctatcattggctcatcagcgacaattcaaattgttcgtgaagtacaaaacttctataaaacgcctgaagcaggtattaaatacaataatcaaataaaagatcgttctatggaatctaatacgttttcatttaattccggacgaaaggttgtaaatcctgatactggtttagaagaagatgtattatatgacgttcgcatagtatcaacagaccgagattctaaaggaattggtaaagttattattggtccatttgcttctggcgatgttacagaaaatgaaaacattcagccgtatacaggcaacgattttaacaaattagcaaattctgatggacgcgacaaatactatgttatcggtgaaataaattacccagctgatgtgatttattggaatatcgctaaaattaatttaacatctgaaaaatttgaagttcagactattgaattatattctgacccaaccgatgatgttatctttactcgcgatggttcactgattgtatttgaaaatgacttacgtccacaatacttaactatcgatttggagcctatatcacaatgacagtaaaagcaccttcagtcactagtctcagaatttccaagttatccgcaaatcaggtgcaagtacgctgggatgacgttggtgctaatttctactattttgtagaaatcgctgagacaaaaacaaactcgggggaaaatctcccgagtaatcaatacagatggattaacttaggatatactgcaaataacagcttcttttttgatgatgctgacccattgacatcatacgttattagagtagctacagctgcgcaagattttgagcagtctgattggatttataccgaagagtttgaaacttttgctacaaatgcttatacatttcaaaacatgattgaaatgcaattagctaataaattcattcaggaaaaatttactcttaataattctgattatgttaattttaataatgacactataatggctgcattgatgaatgaatcatttcagttcagcccatcatatgttgatgtttcatcaataagtaattttattattggtgaaaatgagtatcatgaaatacagggttctattcagcaagtatgtaaggatattaaccgagtttatttgatggaatcagaagggattctatacctttttgagcgttatcaacctgtagttaaagtatccaatgataaaggacaaacttggaaagctgtaaagctcttcaatgaccgcgtaggatatcctttatctaagacagtatattaccaatctgcgaacacaacatacgttctaggatacgacaagattttctatggccgcaaatcgactgatgctagatggtcagctgatgatgtcagatttagttctcaggatataacattcgctaaacttggcgaccaattacatttagtatttgatgtagaaatttttgccacttacgcgactttaccagcgaatgtatatcgcattgcagaagctattacttgcaccgatgactacatttacgttgtcgccagagacaaagttagatacataaaaacgagcaatgcacctatagattctgatccattatctccaacatattcggaaaggctttttgaacctgatacgatgactataaccggaaatcctaaagcagtatgctataaaatggattctatcggtgataaagtttttgctcttattattggtgaagttgaaacattaaatgctaatcctagaacatcaaaaataattgattctgctgataaaggaatatatgttttaaatcacgacacaaaaacgtggaaaagagtttttggcaacactgaagaagaaagaagacgtattcaaccagggtatgcgaatatgtcaactgatggtaaattagtttctctatcatcgagtaattttaaatttttaagtgataatgttgttaatgaccctgaaactgcagcaaaatatcagttaatcggtgctgttaaatatgaatttcctcgtgaatggttagctgataagtattatcatatgatggcatttatagcagatgaaaagtctgattgggaaacttttactcctcagccgatgaaatactatgcagaaccattctttaactggtctaaaaaatctaacacacgttgttggataaacaactctgatagggttgtagtagtttatgctgatttaaaatacactaaagttatagaaaatattcctgaaacatcaccagatagattagttcatgaatactgggatgatggcgattgcactatagtaatgccaaatgttaaattcactggatttaaaaaatatgcatctgggatgcttttctataaagcctctggcgaaataatttcttactatgattttaactatcgtgttagagacactgtcgaaattatttggaagccaactgaagtatttttaaaagcatttttacaaaaccaagagcatgaaactccttggtcgcctgaagaagagcgtggattagctgaccctgatttaagaccgttgattggcacaatgatgcctgattcttatttgttacaggattcgaattttgaggcattttgcgaagcatatattcaatatctttctgatggatatggaactcagtataacaatttacgaaatttaattcgtaacaaatatccacgagaagagcatgcatgggaatatttgtggtcagagatatataaaagaaacatttatttaaatgctgacaaacgtgatgctgttacaagatttttcgaatcacgtagctatgatttttattctactaaaggaattgaagcatcatacaaatttctttttaaagttctttataatgaagaggttgaaattgaaattgaatctggagctggtactgaatatgatataatcgttcaatccgattctttgactgaagatttagtaggacaaacgatttatacagctacaggaagatgtaatgttacttatatagaaagaagctattctaacggtaaattacaatggaccgtaactattcataatcttttgggaagattaattgccggtcaagaagttaaagcagaaagacttcctagttttgaaggcgaaattattcgtggagttaaagggaaggatttgcttcaaaataatatagactatattaatagaagtcggtcatattatgtaatgaaaattaaatccaatttgccttcttcccgctggaaatctgacgttattcgttttgttcatccagtaggatttggatttatagcaattacccttttaacaatgtttattaatgttggtttaactcttaaacatacagagactataattaataaatacaaaaactacaaatgggattctggattgcctactgaatatgctgatagagtagctaaattaactccgactggtgaaattgagcatgattcggtaacaggcgaagcaatttatgagcctggcccaatggctggtgtagaatatcctcttcctgatgactataatgctgaaaataacaattcaatatttcaaggtcaattgccgtctgaacgacgtaaattaatgagtcctttattcgatgcatctggaacaacatttgcacaatttagggatttagttaataaacgtctaaaagataatataggaaatccaagagaccctgaaaatccaacacaggttaaaatagatgaatgattcaagtgttatctatcgtgcgatagttacttcaaaatttagaacagaaaaaatgttgaatttttataattcaattggaagtggtccggataaaaacactatctttatcacatttggaagatcagaaccgtggtcatcaaatgaaaatgaggtgggctttgctccaccttatccaaccgattctgtattaggtgtaactgacatgtggactcatatgatgggaactgtaaaggttcttccatctatgcttgatgcagttattcctcgtagagattggggagatactagatatcctgatccatacacatttagaattaacgatattgtagtgtgtaactcagctccttacaatgctactgaatcaggcgcaggctggttagtatatcgctgtttagatgttcctgacacaggaatgtgttcaattgagtctttaactaataaggatgaatgccttaagttaggtggaaaatggactccttctgttaagtcaatgactcctcctgaaggtcgaggagacgcggaaggaacaatcgaacccggcgacggatatgtttgggaatatctttttgagattccgcctgatgtatctataaatagatgcacgaatgaatatatcgtggttccttggcctgaggaattaaaagaagacccggctagatggggatatgaagataatctcacttggcaacaagatgattttggattaatttaccgtgttaaggcaaatactatccgttttaaagcatatttagattcagtttattttcctgaagctgcattgccaggaaataaaggatttagacaaatatcaataatcacgaatcctcttgaagctaaagctcatccaaatgacccaaatgttaaagctgaaaaggattattatgatccggaagatttaatgaggcattcgggcgaaatgatttatatggaaaataggccacctattatcatggcaatggatcaaacagaagaaatcaatattctgtttacattttaacttaagggagcccatgggctccctttttctttataaatactataaactcataaggaaaccgctatgttcattcaagaaccaaagaaattgattgataccggcgaaattggtaacgcttctactggtgatatcttattcgacggtggtaataaaattaatagtgattttaacgcaatttataatgcgtttggcgatcaacgtaaaatggcagtagcaaatggaactggagcagatggccaaattattcatgctactggatattatcaaaaacactctattgcagagtacgcaactccagtaaaagttggcactaggcatgatattgatacctctactgtaggtgttaaagttatcattgaaagaggcgaacttggcgactgtgttgaatttattaactcaaatggatctatatcagttactaatcctttaacgattcaagcgattgattcaattaaaggtgtttcgggtaatttagtagtaactagcccatatagtaaagtaactttacgttgtatttcatctgataattctacatcggtgtggaattattctattgaaagtatgtttggccaaaaggaatcaccagctgaaggtacatggaatatttctacatccggatcagttgatattccactatttcatcgcactgaatacaatatggctaaattgctagttacgtgccaatcggtagatggaagaaaaattaaaacagcagaaataaatattcttgtggatactgttaattcagaggtcatttcttctgaatatgctgtcatgcgagttgggaatgaaaccgaagaagacgaaatcgctaatattgcatttagtattaaagaaaattatgtaacggcgactataagttcttcaactgtcggtatgagagcagcagttaaagttatcgctacgcagaaaatcggggtggctcaataatgaaacaaaatattaatatcggtaatgttgtagatgatggtaccggtgactacctgcgtaaaggtggtataaaaataaatgaaaactttgatgagctttattatgaactcggtgatggtgatgttccatattcagccggtgcctggaaaacttataatgcttcatcaggacaaacattaaaagctgaatggggaaaatcatacgctattaatacatcttctggaagagtgactataaatcttccaaagggtacagttaatgattacaacaaggtaattagagccagagacgtatttgctacatggaacgtcaacccagttacgctagtagctgcttccggcgatacgattaaagggtctgcagtaccagttgaaattaatgttcaattcagcgatttagaactagtgtattgtgccccaggacgttgggaatatgtcaaaaataaacaaattgacaaaattaccagttcagacattagtaatgtagctcgtaaagaatttttagtcgaagttcaaggacaaacggactttttagatgttttccgtggaactagttataatgtaaataacatcagagtaaaacatcgtggtaacgaattgtattatggcgatgtgtttagcgaaaacagtgattttggttctccgggcgaaaatgaaggagaactggttcctcttgatggatttaatattcgattaagacagccttgtaatattggtgacactgttcaaattgaaacatttatggacggtgtatcgcagtggagaagttcatatacaagacgtcaaattagattgttagattcaaaattaacgtcaaaaacttctttagaaggaagcatttacgttactgatttatcaacaatgaaatcaattccattttctgcttttggattaattccaggagaacctattaatcctaactctcttgaggttcgttttaatggaattttgcaggaattagctggcacagttggaatgccattatttcattgtgttggtgccgattcagacgatgaagtagaatgctctgttttaggtggaacttgggaacagtctcataccgactattcagttgaaactgatgaaaacggcataccggaaattttacatttcgatagagtatttgagcatggtgacattatcaatatcacctggtttaataatgatttgggtacattattaacaaaagatgagattattgatgaaactgataatctctatgtatcgcaaggaccaggggtagatatttccggtgatgtaaatttaacagacttcgataaaattggttggccaaatgtagaagcagttcaatcttatcaacgcgaatttaatgctgtttcaaatatctttgatacgatttatcctattggaactatatatgaaaacgctgttaatccaaacaaccctgttacatatatgggattcggctcatggaaattatttgggcaaggaaaagttttagttggatggaatgaagatatttcggatccgaattttgctctaaataacaacgatttagattctggcggaaatccttcgcatactgcaggtggaacaggtggttctacttctgttacattggaaaatgctaatcttcctgcaactgaaacagatgaagaagttctaatagttgatgaaaatggatcagtcattgttggtgggtgtcaatacgatccagatgaatccggtccaatttacactaaataccgtgaagctaaagcatctactaactctactcacactccgccaacatcaataactaacattcaaccatatattacagtttatcgttggataaggattgcataatgagtttacttaataataaagcgggagttatttcccgcttagccgattttcttggttttagacctaaagctggtaatatagatgtaatgaatcgtcaatcagttgggtcagtgacaatttctcaattagcgaaaggtttttatgaaccaaacgtagaatcagctattaatgatgttcataatttttctataaaagacattggtacaattattactaataaaactggtgtttctcctgagggtgtttctcaaactgattattgggcattttctggaactgtaacagacgattctcttcctccgggttctcctgttacagtattagtatttggtcttccagtttcagcaacaactggaatgacggcaattgagtttgttgcaaaagttcgtgttgcccttcaagaagctattgcgtcatttactgctatcaactcatataaagaccacccaacggatggtagtaaattagaagttacttatttagataatcaaaaacatgtattaagcacatattctacatatggaataactatttcacaggaaattatttctgaatctaaacctggctacggtacatggaatttattaggcgcacaaactgtaactttagataatcagcagactcctacagtactttatcattttgagagaacagcatgagtaataatacatatcaacacgtttctaatgaatctcgttatgtaaaatttgatccaactggtacaaattttccggaagagattactgatgttcaggctgctatagcagccatttctcctgctggcgtaaatggagttcctgatgcatcgtcaacaacaaagggaattttatttcttgccactgaacaggaagttatagatggaactaataataccaaagcagttacaccggcaacgttggcaacaagattatcatatccaaatgctaccgaagaagtttatggacttacacgttattcaacagacgatgaagctgtagctggtgttaataatgaatcatctataactccggctaaatttactacagcaattaatcacatttttgatacacgaatttcttctgaaagttcacttggcgttattaagttatcatctctaccgcaagcattagctggtgcagatgatactactgcaatgactccattaaaaacgcagcagttagctattaaattaattgcgcaaattgctccttctgaaaccacagctaccgaatcggaccaaggtgttgttcaattagcaacagtagcgcaggttcgtcagggaactttaagagaaggttatgcgatttctccttatacgtttatgaattcatctgctactgaagaatataaaggcgtaattaaattaggaacacagtcagaagttaactcgaataatgcttctgttgctgttactggtgcaactcttaatggtcgtggttctacaacgtcaatgagaggcgtagttaaattaactacaactgccggctcacagagtggaggtgatgcttcgtcagcactagcttggaatgctgacgttatccatcaaagaggcggtcaaactatcaatggaacactccgcattaataacacgcttacaatagcttcaggtggagcaaatattaccggaacagttaacatgaccggtggttatattcaaggtaagcgtgtcgtaacacaaaatgaaattgatagaactattcctgtcggagctattatgatgtgggccgctaatagtcttcctagtgatgcttggcgtttttgccacggtggaactgtttcagcatcagattgtccattatatgcttctagaattggaacaagatacggcggaagttcatcaaatcctggattacctgatatgcgtggtctttttgttcgcggctctggtcgtggctctcacttaacaaatccaaatgttaatggtaatgaccagtttggtaagcctagattaggtgtaggttgtactggtggatatgttggtgaagtacagaaacaacagatgtcttatcataaacatgctggcggatttggtgagcataatgattctggagcattcggtaatacccgtagatcaaattttgttggtacacgtaaaggacttgactgggataaccgttcatacttcaccaatgacggatatgaaattgacccggcatcacaacgaaattccaaatatacattaaatcgtcctgaattaattggaaatgaaacacgtccatggaacatttctttaaactacataattaaggtaaaagaatgacagatattgtactgaatgacttaccattcgttgacggccctcctgcggagggccagagccgcatttcctggattaaaaacggcgaagaaatattaggagctgacacacagtatggaagcgaaggttcaatgaatagacctacagtttctgtactaagaaatgttgaagttcttgataaaaacattggaatacttaaaacatctttagaaaccgcaaatagtgatattaaaaccatccagggcatcttagatgtatctggtgatattgaagctttagcgcaaataagtatcaataaaaaggatatttctgacctcaaaacgctaaccagtgaacatacagaaatattaaatggaactaatagtactgttgacaacattcttgctgatattggtccatttaactccgaggccaactctgtatacagaacaatcagaaatgatttactgtggataaagcgtgaacttggacaatacactggtcaagatattaatggtcttcctgttgtaggaaatcctagtagtggaatgaagcatcgcattattaataatactgatgtcattacttcacagggaatacgtttaagtgaattagaaacaaaatttattgaatctgatgtaggttctttgaccattgaagttggtaatcttcgcgaagagcttggaccgaaaccaccgtctttttcacagactgtttatagtcgtttaaatgaaattgacactaaacagacaacagttgagtctgatattagtgctattaagacctcaataggatatccaggaaataattcgattattacgagtgttaatacaaacattgataatattgcatctattaatttagagctaaatcaaagtggaggtattaaacagcgtttaaccgttattgaaacttctattggttcagatgatattccttcgagtattaaaggccaaatcaaagataatacaacttcaatcgaatctttaaatggaatcgtcggtgaaaacacttcatctggtttaagagcgaatgtttcgtggttaaaccaaattgttggaactgattctagcggtggacaaccttctcctcctgggtctcttttaaaccgagtttctacaattgaaacttctgtttcaggcttgaataacgatgttcaaaacctacaagtagagattggtaataacagcacaggaattaaagggcaagttgtagcgttaaatactttagtaaatggaactaacccaaatggttcaactgttgaagaacgcggattaaccaattcaataaaagctaacgaaaccaacattgcatcagttacacaagaagtgaatacagctaaaggcaatatatcttctttacaaggcgatgttcaagctctccaagaagcaggttatattcctgaagctccaaaagatggccaagcttacgttcgtaaagacggcgaatgggtattgctttctacctttttatcaccagcataacatggggccgcaaggccccaaaggattttaaatgtcaggatataattctcagaatccaaaggaactcaaagatgtcattctaagacgtttaggggctccaattattaatgttgagttaacacccgatcaaatttacgattgtatccagcgtgccctagaattatacggtgaataccattttgatggactcaataaaggttttcacgtattttacgtaggggacgatgaagaaaagtataaaactggagtcttcgatttaagaggttctaacgtatttgcagtaactcgcattttacgcacaaatattgggtcaataacatctatggatggaaacgctacatatccgtggtttactgactttcttttaggaatggctggtattaatggcggaatgggaacgtcttgtaatagattttatggaccaaatgcctttggtgccgatttggggtattttactcaacttaccagttatatgggaatgatgcaagatatgctctctcctattccagacttttggtttaattcagcaaatgaacaactcaaagtcatgggaaacttccaaaaatatgatttaattatcatagaaagctggactaaatcatacattgatactaataaaatggttggaaatacagtaggatatggaacagtcggtccacaagatagctggtcattatctgaacgatataataatccagaccacaatttagtaggtcgtgttgttggtcaagacccgaatgttaagcaaggtgcttacaataatcgttgggtgaaagactatgcaacagctttagctaaagaactgaatggtcaaattttagcacgccaccaaggtatgatgcttcctggcggtgttacgattgatggacaacgcttaatagaagaagctcgattagaaaaagaagcactgcgcgaagaattatacttacttgaccctccatttggaattttggtaggttaatatggctacttatgataaaaatctttttgctaaattggaaaaccgcacaggttattctcagaccaatgaaactgaaatattaaatccttatgtaaatttcaatcattataaaaacagccaaatattagctgatgtattagtggctgaaagcattcaaatgcgaggtgtagaatgctattatgttccaagagagtatgtttcccctgatttggtattcggcgaagacttaaaaaataaatttactaaagcttggaaatttgctgcgtatttaaattcatttgaaggatatgaaggagctaaatcgttctttagtaactttggtatgcaagtacaagacgaagtgactttatctattaacccaaatttatttaagcatcaagttaatggaaaagaacccaaggaaggtgatttgatatattttcctatggataacagcttatttgaaatcaactgggttgaaccatatgacccattttatcaattaggccaaaacgctattcgtaaaattacagcaggtaaattcatttattctggagaagaaattaatccagttctacagaaaaatgaaggaattaacattccagaatttagtgaattagaactaaatcctgttcgcaatcttaacggtattcacgatattaatattgatcagtatgctgaagtagatcaaattaattctgaagctaaagaatatgttgaaccttatgttgttgtcaataacagaggcaaatctttcgaatctagcccatttgataatgatttcatggattaataaatattataaactaattaaagcccagattaggagaaatcatgtttggttatttttataattcgtcttttagacgatatgctaccttgatgggcgatttgttttcaaatatccaaatcaaacgtcagttagaatctggtgataagtttatacgtgttcctattacgtatgcatcaaaggaacacttcatgatgaaattgaataaatggacatcgataaattcacaagaagatgtagctaaagttgaaactattctacctcgtataaatttacatttagttgattttagctataatgctccatttaaaacaaacattttaaatcagaatttactgcaaaaaggcgcaacttctgtagtatcacagtataatccatctcctattaaaatgatttatgaattgagtatctttactcgctacgaagatgatatgtttcaaatagttgaacagattcttccatattttcaacctcattttaatacaactatgtacgagcagtttggaaatgatattccatttaaaagggatatcaaaattgtactaatgtctgctgctatagacgaagctatagacggggataatttatctcgtcgtagaattgaatggtcactaacatttgaagtaaacggatggatgtatcctccagtagatgatgcagaaggattaattcgtactacttatacagattttcacgccaatacgagagatttgcctgatggcgaaggtgtttttgaatctgtcgatagcgaagttgttcctcgagatattaacccagaagactgggatggaacagtaaaacaaactttcactagtaatgtaaatagaccaacaccgccagaacctcctggcccaagaacatagaggttattatggaaggtcttgatataaacaaacttttagatatttctgacctccccggaattgacggggaggaaattaaagtatatgaacctctgcaattagtagaagttaaaagcaatccacaaaaccgtactccagatttagaagatgattacggagtagttcgtcgaaatatgcattttcaacaacaaatgctaatggacgcggccaagatttttcttgagacagcaaagaatgctgattctcctcgtcacatggaagtatttgcaactcttatggggcaaatgactacgacgaacagagaaatactgaagcttcataaagatatgaaagacattacatctgagcaggttggcaccaaaggagctgttcctacaggtcaaatgaatattcagaatgcgacagtattcatgggttcaccaacagaattaatggacgaaattggtgatgcttacgaggctcaagaagctcgtgagaaggtgataaatggaacaaccgattaatgcattaaatgatttccatccgttgaatgaagctggaaaaattttaataaaacacccaagtttagcggaaagaaaagatgaagacggaattcattggataaaatctcaatgggatggaaaatggtatcctgaaaaattcagtgattaccttcgtctgcataaaatagtaaaaattccaaacaactctgataagcctgaattatttcaaacttataaagataagaataataaaagatctcggtatatgggtcttcctaacttgaaacgagctaatattaaaacacaatggactcgtgaaatggttgaggaatggaaaaaatgccgagatgatattgtttattttgcggaaacatactgtgccattactcatattgactatggtgtcataaaggttcaattacgtgactatcagcgtgatatgctcaaaataatgtcatctaaacgtatgactgtttgtaatctatcgcgccagctcggtaaaacaactgtagtagctattttccttgcacactttgtatgttttaacaaggataaagctgtaggtattcttgcgcacaaaggctcaatgtctgcggaagttttagaccgtactaagcaagcaattgaactgcttcctgactttttacaaccaggaattgttgaatggaataagggttcaattgaactagataatggttcttcaattggcgcttatgcttcctctcctgatgcagttcgtggtaactcgttcgcaatgatttacattgacgaatgcgcatttattccaaacttccatgattcctggcttgctattcagccagtaatttcatctggtcgtcgttcgaaaattattattactacgactcccaatggattaaatcatttttatgatatttggactgctgccgttgaaggtaaatcagggtttgaaccatacaccgctatttggaattcagttaaagaacgtctttataacgatgaagatatttttgatgatggatggcaatggagcatacaaaccattaatggttctactttagctcaatttcgtcaagaacacactgcagcgtttgaagggacttctggtacattaatttcaggaatgaaattagctgttatggatttcattgaagtaacaccagatgatcatggttttcaccgatttaaaagccctgaaccagatagaaaatatattgcaactctagactgctcagaaggtcgtgggcaagattaccacgctttacatattattgatgttactgatgatgtgtgggaacaagttggtgttttacactcaaacactatttctcatttaattctacctgacatcgttatgcgttatttagtagaatataatgaatgcccagtttatattgaattaaatagtactggtgtgtcagttgcgaaatcactttatatggatttagaatacgaaggcgttatttgcgattcatatactgatttaggaatgaagcaaactaaacgaacgaaagcagtaggatgctctacattaaaagaccttattgaaaaagataagcttattattcatcaccgtgcaactattcaagagtttagaacgtttagtgaaaaaggcgtgtcttgggcggctgaagaaggttatcatgacgatttagtaatgtctttagtaatttttggatggttatcaacacaatcaaaatttattgattatgctgacaaagatgacatacgactagcatctgaagtgttttcaaaagaactccaagatatgggtgatgaatacgctccagtcatatttgttgattcggttcattctgctgagtatgttccagtatctcatggtatgtcaatggtataaatatattaaagcatattaaagaggattaaaaatgactttattatctccgggcattgagctcaaagaaactacggttcaaagcaccgtggttaataactctactggtacagcagctttggccggtaaattccagtggggtcctgcttttcaaattaaacaggttacaaatgaagtagatttagttaatacttttggtcaacctacagctgaaactgctgactattttatgtctgcaatgaatttcttacaatacggaaatgatttgcgagttgtgcgtgctgtcgatagagataccgctaaaaactcatctccgattgccggtaatattgaatacactatttctaccccaggtagtaactacgcggttggaaataaaatcactgttaagtatgtttcagaagatgttgaaacagaaggtaaaattactgaagtagatgctgatggaaaaattaagaaaattaatattcctaccgcaaaaattatcgctaaagcgaaagaagtaggcgaatatccagcattaggttctaactggactgcggaaatttcttcgtctttctctggtttagctgcagtaataactcttggaaaaattattactgattctggtattttattagctgaaattgaaaatgccgaagctgctatgacagctgttgactttcaagcaaatctcgaaaaatatggaattccaggagtagtagctctttatccaggcgagttgggcgataaaatcgaaattgaaatcgtatctaaagctgactacgcaaaaggtgcttctgcattactcccaatttatccaggtggcggaacacgcgcatctactgccaaagcagtgtttggatatggaccacaaactgattcacaatacgctattatagttcgtcgcaatgatgctattgttcaaagcgttgttctttcaacgaagcgtggtgaaaaagatatttacgatagtaacatctatattgatgactttttcgcaaaaggtggttcagaatatattttcgcaactgcacaaaactggccagaaggcttctctggaattttaactctgtctggtggtttatcatcaaatgctgaagtaacagcaggagatttgatggaagcttgggacttctttgctgaccgtgaatctgttgacgttcagttgtttattgcgggttcttgtgccggtgaatctttagaaacagcatctactgtccaaaaacacgtcgtttcaattggggatgctcgccaagattgcttagtactgtgctcaccaccgcgtgaaactgtagttggaattcctgtaactcgtgctgttgataacttagtcaattggagaaccgcagcaggttcatacactgataataactttaatatcagttcaacctacgcagcaattgatggtaactacaagtatcagtacgacaaatataatgatgtgaatcgttgggttccattagcagctgatattgctggtttatgcgcaagaactgataacgtttctcagacttggatgtctccagctggttataatcgtggccagattcttaacgttattaaacttgctattgaaactcgtcaggcgcagcgcgaccgtttataccaagaagctatcaacccagtaactggtacaggtggtgatggttacgtattgtatggtgataaaacagctacttctgttccttctccatttgatcgtattaacgttcgtcgtctgtttaatatgttgaaaacgaatatcggacgtagttcaaaatatcgtttgttcgaattaaacaacgcgtttactcgttcatcattccgcacagaaacttcccagtacttgcagggaattaaagctctcggtggaatttatgaatatcgtgtagtttgcgatacaacaaataacactccgtcagtaattgatagaaatgagtttgttgcaacattctacattcaaccggctagaagcattaactacattaccttaaacttcgtagcaactgctactggtgcagatttcgatgagttaactggtcttgcaggttaatacggtgcattctaaaggcctgtttcggcaggccatataaatacactatatccttaattctttaattctatatgcctaggttaaacatagggatataaatactacagaggctaatatgtttgtagatgatgtaacacgagcgtttgaatctggtgattttgctcgacctaacttattccaagtagaaatttcttatcttggacaaaattttacgtttcaatgtaaagccactgctttaccagctggtattgtagaaaaaattccagtcggatttatgaaccgtaaaattaacgtagcaggcgatcgtacattcgatgactggactgttacagtaatgaacgatgaggcacatgatgctcgccagaagtttgttgattggcaaagcattgctgctgggcaagggaacgaaattactggtggaaaaccagcagagtataaaaagagcgctgttgttcgccaatatgctcgtgatgctaaaactgtaacaaaagaagtcgaaattaaaggcctgtggcctactaacgtgggtgaacttcaattagattgggattcaaacaatgaaatccaaacctttgaagtaactcttgctctcgattattgggaataaaatgaatggggagaaatccccatcctgcttaaagcagagaagtccattataaatataactataattcccatttggagaatacaatgaaatttaatgtattaagtttgtttgctccatgggctaaaatggacgaacgaaattttaaagaccaagaaaaagaagatcttgtttccattacagccccaaagcttgatgatggagcaagagaatttgaagtaagctcgaacgaagctgcttctccttataatgctgcattccaaacaatttttggttcatatgaaccaggaatgaaaactactcgtgagcttattgatacatatcgtaatctcatgaataactatgaagtagataatgcagtttcagaaatcgtttcagacgctatcgtctatgaagatgatactgaagtcgtagcgttaaatttggataaatctaaatttagtccaaaaattaaaaatatgatgttagatgaatttagcgatgtattaaatcatctatcgtttcaacgaaaaggttctgatcattttagacgttggtatgtcgattcaagaattttctttcacaaaattattgatccaaaacgtccaaaagaaggcataaaggaattacgtagattagaccctcgtcaagttcagtatgttcgtgaaattataacagaaactgaagctggcacaaaaatagttaaaggttacaaagagtattttatatatgatactgcacacgaatcatatgcatgtgatggtagaatgtatgaagctggcacaaaaataaaaattcctaaagctgccgtcgtttatgcccattctggattagtcgattgctgtggtaaaaatatcatcgggtatttgcatcgtgctgttaaacctgctaaccaattaaaattattagaagatgctgtagtcatttatcgtattactcgtgctcctgaccgtcgtgtttggtatgtagacacaggtaatatgcccgctcgtaaagctgccgagcacatgcaacatgtcatgaacacgatgaaaaaccgtgtagtatatgatgcatcaacaggtaaaataaaaaatcaacagcataatatgtctatgaccgaagactattggttgcagcgccgcgatggtaaagctgtgacagaagttgatactcttcctggtgctgataataccggtaatatggaagatgttcgttggtttagacaagctctttatatggcattacgtgttcctctttcacgcattccgcaagaccaacaaggcggtgtgatgtttgattctggaactagcattacacgtgatgaattaacgtttgctaaatttattcgtgagttacagcacaagtttgaagaagttttcctagatccgcttaaaacaaatctgttgcttaaaggtataatcacagaagatgagtggaatgatgaaataaataatattaagatagaatttcatcgggatagctactttactgaactcaaagaagcagaaattttggaacgaagaattaatatgctaaccatggcagaaccatttattggtaaatatatttctcacagaactgctatgaaagatattttgcagatgactgatgaagaaatagaacaagaagccaagcaaattgaagaagagtctaaagaggctcgtttccaagaccccgaccaagaacaagaggatttttaatggaaggtttaattgaagctattaaatcaaacgacctcgtagccgctcgtaaattctttgctgaagccatggctgcaagaacgattgatttaattaaagaagaaaaaatcgctatcgctcgcaatttcttaatcgaaggtgaagaacctgatgatgaggatgatgacgaagacgaggatgatgaagatagcgatgataaagacgacaaaaaagacaaagactctgatgaagatgacgaagacgaggatgatgaataatgcttctgatccctgaaactcatgaattagttctcgagaatgtcgaagcacttattcctgaagcacagggtcgctttgacgaattgtcttctgctttaaataaagacgatataaatacaattgtcgagaatatgcttgatgatgaaactgatttagcgattgcattagcttctattaatgaagatatgccgctaaatgaattcatcgttaaacatgtttctgctcgtggtgaaattacacgtaccaaagaccgcaagacgcgtgaacgtaatgcatttcaaaccaccgggctgtctaaagcaaaacgtagacaaattgctcgtaaagctaccaaaacgaagattgccaatccagcaggtcaatctcgtgctcagcgtaagcgtaaaaaagctcttaaacgccgtaaagcattaggattaagctaatgaatgaaccccaattactaattgaaacttggggtcaacctggcgaaattattgatggtgtgccaatgcttgaatcccacgatggaaaagacttaggtttaaaacctggtttatacatcgaaggaatattcatgcaagcggaagtcgtcaatagaaataaacgtctttatccaaaacgcatattagaaaaagcggtaaaagactatatcaatgagcaagttttaactaaacaagctctcggagaattaaatcatcctccacgcgctaatgttgacccgatgcaagccgctatcattatagaagatatgtggtggaaaggaaatgacgtatacggacgagctcgtgttattgaaggtgaccatggtcctggagataaattagcagctaatattcgtgccggatggattccaggagtttcttctcgtggattaggttcattgactgacacaaataaaggttatcgtatcgtaaacgaaggattcaaattaactgtaggtgttgatgcagtatggggtccaagtgctccagatgcatgggtaactcctaaggaaattaccgaatcacagacggcggaagccgatacaagtgccgatgacgcctatatggctctcgcagaggccatgaaaaaagcgttataaatattattatctaaacaacaggactacaaaatgcttaaagaacaactgattgctgaagcgcaaaaaattgatgcttccgttgctcttgatagtattttcgaatcagttaatatttctccggaagcaaaagaaactttcggcactgtattcgaagctaccgtcaagcagcacgccgttaaattagctgaatctcatatcgctaaaattgctgaaaaagcagaagaagaagtagaaaaaaataaagaagaagccgaagaaaaagctgagaagaaaatcgctgagcaagcttctaaattcatcgaccatcttgcgaaagaatggctcgctgaaaataaattagcagttgataaaggcatcaaagccgaactgtttgaatccatgcttggtggattaaaagagctctttgttgaacacaacgttgttgttccagaagaatcagttgatgttgtagctgaaatggaagaagagctgcaagaacataaagaagaatcagctcgtctgttcgaagaactcaataagcgtgacgcatatatcaattatgtgcagcgtgaagtggcattgagcgaaagtactaaagatctgactgagtctcaaaaagaaaaagtctctgctctggtcgaaggtatggattattcagatgaattctcaagtaaattgagtgccatcgtagaaatggtgaagaagtctaataaagatgaaagcactattactgagggtataaatactcctgatactgaagcagccggactgaatttcgtcactgaagctgtagaagataaagctgcacctggtgcagaagatattgtaagtgtatatgcgaaagtcgcatctcgtttctaattttaaaggttaacacaaatgactatcaaaactaaagctgaacttttgaacaaatggaaaccattactggaaggtgaaggtttaccggaaattgctaatagcaaacaagcgattatcgctaaaatctttgaaaaccaggaaaaagatttccagacagctccagagtacaaagacgaaaaaattgctcaggcgttcggttctttcttaacagaagctgaaatcggtggtgatcacggttacaacgctactaacattgctgctggtcagacttctggcgcagtaactcagattggcccagctgttatgggtatggtacgtcgtgctattcctaacctgattgctttcgatatttgtggtgttcagccgatgaacagcccgactggccaggtattcgcactgcgtgcagtatatggtaaagacccaatcgcttccggtgctaaagaagcattccacccaatgtatggtccagatgcaatgttctctggtcagggtgctgctaagaaattcccagctctggctgctagcacaaaaactgttgtaggtgacatctatactcacttcttccaggaaactggtactactgtgtatctgcaagcttccgctgcagtaacaatcgatgcaactaaactggatgctgaaattaagaaacaaatggaagctggtgtactggtagaaatcgctgaaggtatggctacttctatcgctgaactccaggaaggtttcaatggttctaccgataacccgtggaatgaaatgggcttccgtatcgataaacaagttatcgaagctaaatctcgtcagctgaaagctgcttactctatcgaattagcacaagacctccgcgctgttcacggtatggatgctgatgctgaactgtctggtattctggctaccgaaatcatgctggaaatcaaccgcgaagttgttgattggattaactactcagctcaggttggtaaatctggtatgaccctgactccgggttctaaagctggtgtatttgacttccaggatccgattgatattcgtggtgctcgctgggcgggtgaatcctttaaagctctgttgttccagattgacaaagaagcagttgaaattgctcgtcagaccggtcgtggtgaaggtaacttcattatcgcttcccgtaacgtagttaacgttctagcttcagttgatactggcatttcttatgctgcacagggtctggctaccggctttaacactgatactaccaagtcagtatttgctggtgttctgggtggtaaataccgtgtatatatcgaccagtatgctaaacaggattatttcactgtaggttataaaggtccgaacgaaatggatgctggtatttactatgctccatatgtagctctgactccgctgcgtggttccgatccgaagaacttccaaccagtaatgggattcaaaactcgttacggtatcggtatcaacccatttgcagaatccgctgctcaggctccggcttctcgcatccagagcggtatgccttctattctgaatagccttggtaaaaacgcttacttccgccgtgtatatgttaaaggtatctaatctttgacgatttaagggaccttcgggtccctttagttgtttttatggtataaataaatcatataaaccaaaaggaaagcgcaatggctaaaatcaacgaacttctgcgcgaatcaaccacaacgaatagcaactcaatcggtcgcccaaatctcgttgctttgactcgcgctaccactaaattaatatattctgacattgtagcaacgcaaagaactaatcaacctgttgctgctttttatggtatcaaataccttaacccagataacgaatttacatttaaaactggtgctacttacgctggcgaagctggatacgtagaccgagaacaaatcacagaattaacagaagagtctaaattaactctcaataaaggcgatttattcaaatataataatatcgtttataaagtattagaaaatacaccatttgctgatattgaagaaagtgatttagaattagctcttcagattgcaattgttcttttaaaggttcgtctattttctgatgctgcagtaacaagcaaatttgaaagctctgatagtgaaattgcggatgctagattccagattaataaatggcaaaccgcagttaaatctcgtaaacttaaaactggcattacagttgaattagcgcaagatttagaagcaaatggattcgatgctcctaatttcttggaagatttgcttgcaactgaaatggcggatgaaatcaataaagatattctacagtctttgattacagtatcaaaacgctataaagttacaggaattactgatactggattcattgatttgagttatgcatctgcgcctgaagctggtcgttcattataccgaatggtgtgtgaaatggtttcgcatatccaaaaagaatcaacttatactgcaacgttctgtgttgcttcagctcgtgccgctgcgattcttgctgcatcaggttggttaaaacataaaccagaagatgacaaatatctttcacaaaatgcctatgggttcttagctaatggtttaccgctttattgcgataccaacagcccattagattatgtaatcgttggcgtagtagaaaatatcggtgaaaaagaaattgttggatcaattttctatgctccgtatacagaaggtcttgacttagatgaccctgaacatgtaggtgcatttaaagttgtagttgatccagaaagcttacaaccatctatcggtttattggttagatatgctttatctgcaaatccttatactgtagcaaaagatgaaaaagaagcaagaataattgatggtggagacatggataaaatggcgggtcgttcagatttgtctgttttattaggtgttaagctaccaaaaattatcgttgatgaataaaacaaagggacctttcggtccctttttatttaacttaccaattcaatccaagccggacgaagtacatcttgtaccattttaactaattccttcttaatcaaggaaggattatccgcttgagttaaagtaataccttcacgagaagtttcttccaaaatatcttgaacagttagtcccatcacctttccaaaatcttttggaccaatttcgccaattttagaaataacgttatttactcggtttagtgtaacgtaacaagctaaaatccccaccaatttgttatcagcttctgacagttcaactttagctttaataggcttatcagactttttcttttcactaaatttagaattcttgcatttgatagctacacgattgcgattaggcagccaagaaggataacaaggtttcaatacatatccttcagcggtaaatacttcgcctttggcttcagctttccaaacacatttgttagcgtcaattaaacctgcattatctacggtaaaattataagacggaacaacagaatccaaatcatttggaagtttaataagatcttcaaatttaccacgacccaaaagtggagcgattttaaacccaaatgaattacaaaacgattccatcatgtaatcatcaacataagttacatcgccactttctgtagtgacaataatgtcaaatacataaaaatctttatcgccataatcaacattcttctgaatgccaggtccagcgaattcgccaaagacttgataagatacaaccgctgaagtttccataatatcttgtactgctttaatggaatcagcgtaattctttagaataatttcatacccaaagaaatcttcagcaggaagaatcggtccagtacgtttagcgcaagttactttatcacgctcaataatcaaagaaaagtttgttccatgaattttttcacgagctacccattcgccgccagtcaatcccaagctataaagtttttcaataaatttagagttgtaatgattttcaagactgctatactttttaaacataattaatcctcaaaatgtaatttctaaccaatcaccatcacgctgatcactattgactttaaaattaaatccttcttttctcagccaatcaccaatttcttcagtaatcaatttatcgcgagcagtacaataataactaaaatatgttttaccttgttcagctgctttattagcaagttctgaaaaatctttaataaaacactctagcttaaactgtttactttttaatgctttttcacgtaattgattagcaaaagattcattttcataaagatcatactgttccatttttcacctttttattaatatgtctttttctatagacaactttttctcgagtctcaaatttattcttagcagtcatagctcgagcccataatacagccacttctttcgcctgtaagtttaattcacgagcaatttcaatgaatgactttccagactcatgaagagtaaacaccacaacctcagttctcataatcaatctcatgttatcgagttggtgccattatatacaccattttctgattgtgttttgtgtgctttcaaaatgaaaaaaggggccgaagccccttatgattatggataggtatagatgataccagtttctaaagcagttttgtgaatgatgtatccattacgcgattcttgaacatcaacttctggataatctttcatcattttctgaagagtgtaacgatgcaagtagtacttactatctggatcatcagttttccaatctttaccttcttcggtcattttttggatttcattcataacccaccaaccacaccagatgtaagctgaagtacgatgtggaagaggatgaacataaggtaattcaccttctggttctggagcaactttatcagttacctgaacttgaccttctgctgtaatagttttgctatcataatcagtagcagtaacagttgcagtaacttcaatagtttgacttccaacagatgacgtatcaacggtatacacattagttgatccttctacaggagaagaatctttcttccatgaataagcaatttgtgctttttctggtgcatcagtgacattagcagtaaatgtagccaaagcatcttgttgaacgttaatagaaggaggagtcaatgtaacctgtggattcattgtcttcttattaaccgttaatgatacttcattcgaagtaactttttttgcgtcataatccgccgttgccgtcacttgggctacgcatttaattcgttttactccacttgtagtaggagtataactaaatgtagtgttagtttcttcaccaatttgagaatcatctacataccattgatacgtagcagatgcgcctgatggttgagaagctaagtcagcggtaaattcaacagctgttccaatcactccagcagcaggactaccaggagttactgccaaggtagttgtctgtgtcttattttgaactgtgatagttgtactaatttcagctgtttcagctgtttcagctgtttcagctgtttcagcttcagaatcaggaactggatttgttgcaactaccttaatagtcttttgtccagcaggaccttttagtacataactaaaagttgcagacgtttcttcctgcggtgcatcatcaacagtccaagcataggtaataggtctatctccagtttgaccactgggcgtagcagtaaactgcttagtctcatctataactccagtaggtgttttaggagttatatcaactgtaaaagccataagttatccttattttaatgttacgaaagaagaattacgagtttcacgaattaaaactgatccatcgcgattaatgtaataaattaagctaaataatgtttggtgtgcagaagcatgctcaaaactggttggacgagatttccaatccggagtttcagcgatccattgataaatccaccaaggaacagtgcagaatcctggattttttccaatcagctgaagattcggactaaagttttccggaagagtaaatacagacggcttttcagattcaataatctcagctacagcctgttcgaatttttcttcaacaaaaggagtatcttcaatcaaaacatcggtattttcaggaattttatccgtttctactacttcaattttaatgtcagatttaaccggagaatcaatcagaagtgctgcctctggattgacttcttcatcgtcatattttaatccctctgcagcatcagcagcatcaattaagtctttaatagataacccatcagtctctggcataggttcactagcgagcttctggagagcttcttcaatatcaacaacgatattatcaaaagatttattctttttgacctttataccaaactgttcagcatattcagctaatttagctttagcttctttattatcatcaagagccttcagctctgcaatataatctttatctatcataatatttcctcagtataaatatagatatatttattacatggtatttagacatgactgacattaaagtacatttttatgattttagtcacgtgagaattgattgtgaagaaagtacatttcatgaactccgtgatttctttagctttgaagctgatgggtatcgttttaatccgaagtacaaatatggccactgggatggacgaatccgtcttttagattataatcgacttcttccattcggcttagtcgggcaaattaaaaagttctgtgataactttggctataaagcctggattgacccgcaaattaacgaaaaagaagaattatcaagaaaagattttgatgaatggctttctaaattagaaatctattcaggaaataaaagaattgaaccacactggtatcaaaaagatgcagtgttcgaaggattagttaatcgtcgtagaattcttaatcttccaacatccgctggtaaatcgttaattcaagctctgcttgctcggtattatttggaaaattatgaaggtaaaattcttatcattgttccaacaactgctctgacaactcagatggctgatgacttcgtcgactatcgtttattcagtcatgcaatgataaagaaaattggtggcggagcatcaaaagatgataaatataaaaatgatgcaccagtcgttgttggtacatggcaaactgtagtaaaacaaccaaaagaatggttctcacagtttggaatgatgatgaatgatgaatgccatcttgctacaggaaaaagtatttcatctatcatatcaggtttaaataactgcatgttcaaatttggtctatctggttcattacgtgatggcaaagccaatatcatgcagtatgttggaatgtttggtgaaatatttaagccagtaacgacttctaagttaatggaagatggacaagtaactgagttaaaaattaatagtatttttcttcgctatcccgatgagttcactactaaattaaagggaaaaacttaccaagaagaaataaaaattattactgggctcagtaaaagaaataaatggatcgctaaattagctattaagcttgcgcaaaaagatgaaaacgcttttgtcatgtttaaacacgtatcacacggtaaagctattttcgatttaattaaaaatgaatacgataaagtttattacgtatcaggggaagttgataccgaaacacgcaacgtaatgaaaaccctagctgaaaacggtaaaggaataattatagtagctagttatggtgtattttctactggtatttcagttaaaaatctgcatcacgttgttttagcacacggtgttaaatctaaaattattgtattgcaaacaataggtcgcgtattacgtaagcatggttctaaaacaatcgcaacggtctgggacctcatcgatgattgtggtgttaagccaaaatctgctaatacgaaaaagaaatacgttcatttgaactatcttttaaaacacggcattgatcgtattcagcgctacgcagatgaaaaatttaattacgtaatgaaaacagttaatttataagggcttcggccctttggagaaaaagatgttactagaatttaaacaatttctttatgaagcttctattgatgaatttatgggtaaaattgcctcttgtcaaacattagaaggtctagaagaacttgaagcttattataagaaaagagttaaagaaactgaattaaaagatactgatgacatctctgtgagagatgctttggcaggaaaaagagctgaattagaagattcagacgatgaagtagaagaaagcttttaaattaaaaaaggcccaaccaaaaaggaagggccaaaactatagactaaaggtcacactatagcaaaagttgtgtttcatttaattgttcttccgaactttctgaaactggtagttctttaatgtaattataacaaggcccaggatgtacaggacctttgtctgtttcaacaaccaatgcagaatcgattggagttttacagacaacacaaatcttatctgacatgattgtctcctctaaattatatatctatttatataactctcatatgcatatcaatgcccatatctttagaataaaaatactcatcaagatacccggcaaattttcctttaatataaagtacatcttcaccgcatgggtggtcggccaggatacgaatatcctgacgcttgagattatactttttcattaagaattgaatttccgtttcgaattcttcttcataattaaaagcatcatcaatgctatatttcattattttccagcctcaaatgctcgcatgtcttgaatatgcttaatagcaaatccacgtgatttaatagcatcaagagctccgctacagaaatctaataaaattccccaatattgtaatgaagtatcaacttttaaaacatccttatcagctgatagaactgtcttcatttctgatttctcataacggtccatactaaattcatcaccatctcctcgtcccgagtagtagtctaatttagctttaagagcaacttttttctgtgcgtcaattctaagcatttcctttttaatacttgaatgcttattaagccatttactatataacatcacattattagctgcttcatactgtaatttagtcgaatctataaacacatctttcttcaattcttcttgaagatcttctaatctcatattgttctctattcaattgttattggatggacttagattcattataccacgtttatacgtgaagcattatactctgttactggaagccagttgtagttttatctgttcaatatcatcagggttatcgatgaccgaaaagcgtatttctactatcagagtataatcatcataaaccggtattacattaactgctaatttatcaatacgtggctcgtagtttcttactgcgctttcaatgttacgctcaacagtatcagcagtaagaggagtcatattctcaaaaagctgatcagataaatcgcatccaaattctgggtcaaatggccttgaccctttcctggttgtaataattcccaaaaggctatttttaattgaccttaatccaagagatctggaaacgtctttgtcccaatccattttcatttctgggtcaatgtcagaataaagcttattaatatttgccattacaatagctcaaagaattctttgagtcctcttattacatgagcgtgagtttttccacactctggacacttaattggaacagccaaataaacagtaggctttaaaagcatatcttttatagctacaatatctgactctgtgatgatagaatataaatcttccaattctttttcatttaagtcttcaactggaatgctttcaccgttagcatgaatcgtttctatacatgatactatcatgcgggctatatttttatcatcaaaaattttagggtaatggaatttaattttaatgtcacccagtgtataccagaggtcttctggtgcatctatttgtgtatgtaatagatttatatgggttggtatttcagttccacaggtgcacttccaggagttttcgtgattaacttctccaagagaatgcgcccataaatgaatcagtaataattctgattcttggcggtttaaatcttttgcatttgtacagtctttgattagctttttaacaatctcttctactgaaccattctttttagcagtaataagttctagatattctttaagagtaaatgcgcgacagttgattattttagaaccaactctcacatcaaatttgtattcatacatatttagctcctttatttatcatatttataaatagaataaaaggagcatctatggcaaacattattcgttgtaaattaccagatggtgttcatcgttttaaaccatttacggtagaagattatcgagattttttgttagttcgaaacgatatagaacatcggtcaccacaagaacaaaaagaaataattgctgatttaattgctgattattttggagactatccgaagacttggcaaccatttatatttttgcaggtatttgtagggtcaataggtaaaactaaagtaccggtcacatttgtatgtccaaaatgtaaaaaagaaaagacagttccatttgaaatatatcaaaaagaattaaaggaacctgtttttgatgtagctaatgttaaaattaaattaaagtttccttctgagttttatgaaaacaaagcaaagatgattactgaaaatattcattctgttcaagtagatgaaatgcggtatgattggaatgaaattagcgaatcaagtcaaatagaacttgttgatgccatcgagatagaaacattagaaaaaattctcgatgcaatgaatcctattaatttaacattgcatatgtcatgctgtaataagtatgtaaaaaaatacactgatatagtagatgtgtttaagctattagttaacccagatgaaatatttactttttatcaaatcaatcacacgcttgtaaaaagtaattatagcttaaattcaataatgaaaatgattcctgctgagcgcggattcgtattaaaactgattgagaaggataaacaataatgagtatgctgcaacgccctggatatccaaatctcagcgttaaattatttgatagctacgacgcttggagtaataatagatttgttgaattagctgctactattaccacattaactatgcgggattctctttatggccgaaatgaaggaatgctgcagttttatgattctaaaaatatccatacaaaaatggatggaaatgaaataattcagatttctgtagctaatgcaaatgatattaataatgttaaaacacgaatttatggatgtaagcatttttcagtgtcagtagattcaaagggtgataacatcattgctattgaattgggaactattcattctatagaaaatcttaaatttggcagaccgtttttctctgatgcaggtgaatctataaaagaaatgcttggtgtcatttatcaggatcgcacgttattaactccagcaataaatgctataaatgcttatgttcctgatattccatggactagcacatttgaaaactatttgtcgtatgtcagggaagttgctctagctgtaggaagtgacaaatttgtatttgtgtggcaagacatcatgggagttaacatgatggactatgatatgatgataaatcaagaaccgtatccaatgattgtcggtgagccatctttaataggtcaattcatccaagaattaaaatatccattagcatatgatttcgtttggttgactaaatcgaatcctcataaacgtgacccaatgaaaaacgctactatctatgcgcattcatttttggattcttcattgccaatgattactacaggaaagggagaaaactctattgtagtgtcaaggtcaggtgcttattctgaaatgacttataggaatggatatgaagaagctattcgtcttcaaactatggcacaatacgatggttatgctaaatgttctactgtcggtaattttaacttgactcctggcgttaaaattatttttaatgatagtaaaaaccaatttaaaacagaattttacgttgatgaagttatccacgaattatccaataataattcagtaactcatctatatatgttcactaatgcaacgaaactggaaacaatagacccagttaaggttaaaaatgaatttaaatctgatactaccactgaagaaagtagttcttccaataagcaataaagaagtttctattcctaaaatgggtcttaaacattataacattttaaaagatgttaaaggtcctgatgaaaatttaaaacttcttattgattctatttgtccgaatttatcaccagcagaagttgatttcgtttccattcatttattggaatttaatggaaagattaaatctcgtaaagaaatagatggttatacttatgacattaatgatgtttatgtatgccaaagattagaatttcaataccaaggaaatacattttattttagaccgcctggaaaatttgaacaatttttaactgtgagcgatatgttatccaaatgcttgcttaaggtcaatgatgaagttaaagaaattaattttcttgagatgccagcattcgttttaaaatgggcaaatgatatttttacaactttagcaattcctggccctaatggtccaataactggaattggtaatattattggattatttgaatgaaaaagccacaagaaatgcaaacgatgcgtagaaaagttatttcagataataaaccaacacaggaagcggctaaatccgcttctaacactttatctggacttaacgatatatctacgaaattggatgatgctcaagctgcttctgaattaattgctcaaactgtcgaagaaaaatcgaatgaaataattggagcaattgacaatatagaaagcgcagtgagtgatactactgctggttctgagttaattgctgaaactgtcgaaattggcaataatattaataaagaaatcggtgaatcgctcgggagcaaattagataaattaacaagtttactggagcaaaaaattcagacagctggaattcaacaaacaggaactagtttagccacggttgaaagcgctattcctgttaaagttgttgaggacgatacagctgaatctgtgggtcctttattaccggctcctgaagcagttaataatgatcctgatgctgattttttccctacccctcagccagttgaacctaaacaagaatcgccagaagaaaaacagaaaaaagacgcatttaacttaaaattatctcaagctttagataaattaacaaagactgttgatttcggatttaaaaaatctatttcaattactgataaaatatcaagcatgctatttaagtataccgtcagtgctgctattgaagctgctaaaatgacagcaatgatattggctgttgttgtcggaatagacctgttgatggttcatttcaaatattggtcagataaattttcgcaggcatgggatttatttagtacagactttactaaattctctagtgaaacaggaacatggggtcctttattacagagcatctttagttctattgatgaaattaaaaaattctgggaaaagggagattggggcggtttgacggtagctattgtagaagggcttggaaaggttctttataatttaggagaacttattcagcttggaatggctaaattatctgctgcaattcttcgagtcattcctggcatgaaggataccgctgatgaagtagaaggaagagcactagaaaatttccaaaattctactggagcatctctcaataaagaagaccaggaaaaagttgcaaattatcaagataaacgaatgaacggagaccttggtccgatagcaaaaggattagataaaattgctaattggaaaactcgtgcatctaactggattcgtggcgttgataataaagaagcactaactaccgacgaagaacgtgcagcagaagaagaaaaattaaagcaactttcaccagaagaaagaaaaaatgctttaatgaaggctaatgaagctcgggccgcgatgattcgttttgaaaaatacgctgattcggctgatatgagtaaagactcaacggttaaatcagttgaagctgcctatgaagaccttaaaaaacggatggatgacccggatttaaataattcaccggcagttaaaaaagaacttgctgctagattttctaaaattgatgctacttatcaagagctcaagaaaaatcagcctaatgccaaacctgaaacttctgctaaatcgccagaagcaaaacaagtccaggtaatagaaaagaacaaagcacagcaagctcctgttcaacaagcatctccttcgatcaataatactaataatgttgttaagaaaaatactgtcgttcataatatgacacccgtaacgagcacgactgctcctggtgtatttgatgcgactggagttaattaaggaataatatggcaattgttaaagaaataactgctgatttaattaaaaagtccggtgagaaaatttcagccggacagagtactaaatcagaagtagtaactaaaacatacactgcccagtttccaactgggcgtgctagtggtaatgacactacaggggacttccaggtaacagatctatataagaatggattattatttactgcatacaatatgtcatctagggattctggaagtcttagatcgatgagatctaactactcttcttcatcttcgagtattttaagtacagctagaaacactattagtagtacagtatcaaaactatcaaatggattaatatccaacaataattcaggaacaataagtaaagctcctgtcgcaaacattcttttaccgagatctaaatctgacgttgatacgtcatcacatagatttaacgatgttcaagaaagtcttatcagcagaggcggaggtactgctactggtgtgttaagtaatattgcttcaactgcagtatttggggcactggaaagtataacacaaggtataatggctgataataatgaacagatttatacgacagccagaagtatgtatggcggtgctgagaatagaactaaagtgtttacatgggatttgactccacgttcaacagaagatttaatggctattatcaatatctatcaatattttaactatttttcttatggtgaaacgggcaaatctcaatatgctgctgaaataaaggggtatttggatgattggtatcgttctacgttaattgaacctttatctccggaagacgcagctaaaaataaaacactatttgagaaaatgacatcgagtttaactaacgttctagtagtttcaaacccgacaatttggatggtgaaaaactttggcgcaacatctaagtttgatggaaaaacggaaatatttggcccatgccaaatacagagcatcagatttgataaaacacctaatggtaactttaacggattagctattgctccaaacctccctagtacatttactcttgagattactatgagagaaattatcacgttaaaccgtgcttctttatatgcggggactttttaatgtattctttagaggaatttaataatcaagcaataaacgcagatttccaacgtaataatatgtttagctgcgtttttgcgacaactccatcaactaaaagctcttcgttgataagttcaattagcaacttttcttataataacttgggtctaaattcagattggttaggattgactcaaggcgatattaatcagggaattaccacgctaattactgctggcacacaaaaactgataagaaaatcaggggttagtaaatatcttattggtgccatgagtcaacgtacagttcaaagtttattgggctcatttacagttggtacatatttaattgacttctttaacatggcatataactcatctggattgatgatatattccgtaaaaatgccagagaatagattatcctatgaaactgactggaactataattctcctaatattcgtataactgggagagaattagaccctttggttatttcatttagaatggattcagaagcttgtaactatcgtgcaatgcaagactgggttaacgctgttcaagacccagtaactggattgcgtgctttgccacaagatgtcgaggcagatattcaggttaatcttcattctcgtaatggattgcctcatactgcggtgatgttcactggatgcattccaatatcagtgagcgctcctgagttatcatatgatggagataaccaaataactacatttgacgttacttttgcgtatagagtgatgcaggctggagcagttgataggcaagctgcgcttgaatggcttgaatctgctgctataaatggtattcaaagcgttctcggaaatagtggaggtgttactggactatctaattcgctttcacgactcagtagattagggggaactgcaggaagcatttcaaacattaatactatgacaggaattgtcaattcgcaaagtaaaatattaggagcaatataacaatggggacctttcggtccccatatttttatttacggaatgaaataaaagcagaaactgaagcaactaaactgtcttcaatataaacttcaatttttactggagcttctgactcaaatttacctgttactacaccttggaaaatgctttcagtctgttctggctttgaaaaattttcagaaggaaaaattccgaactttttatctgttccaaaaattttgataaattcatcataaactgcttcattaaaagcattatcagcaggaataacgccttcaactacaagttcttgacctaaaaagcgcaaagaagatttcattttgtgttcctcatgttatgtcagtaaaattactataacacaacacgagggacttgtaaactacattttgaactttttagacattccgttgatgttaaccaaagaagctaagatttgagaaacttcgttttcctcttcttttgattcttctacaaggaattgattaaatccagccattggacgaacttcaccagtttccatcaaatgatcgccatcatatactgattcttctaattgctcagaaggaggaacgattgtgccttcgattagatacttattataagcagtttctttcatcatgtacgtgctcactttattaatcttcagtaaaattccacgtggtagaataacttcagcttctgatggaaatcctgataaatgacctggaacgataactttgattcgctcagctcctttaattaccatacccacgctagtttcagcatcttcattagcatatgtagaatgactacccatatgcatcaaatcttctgcatcaacggaaccttctccttcaccagaaaatactgcgccggaatcatctagagccatatagtttttaccatgctcacagaagatatttggtttaagcgatgtggatacgaagttcttgaaatagaacattttattttcaatgttatgacgcaaagttttaaaggtaacttcttgcccacgataaagagtagttcctggaggaagaactgaacctttagcaaatgcagaatccaacgtctcgatgtgtttaatagctcgttccatatattcttcacgagtagaatctggtttacccaagaggaacgagttcatttcaacatatgaatctgcacaataatcttcaattacatcagactcagcctgagtcagtccttttggagttacttcggtgcttgcgtattcatatgcctgagcagcagattcattaatcaatttataaatgccattcatgacaaattgaataatagctaccttttcgtctggcgtggctttagaacctttaactaaatcattgataattttcttaataacatcaaagctattagaaatattaatgtcagcgagatcgcttaaaattttatcggttttataatcaaagaattctttattctttaaatattcttgagaaccttgatatgttatatcgctctgcagcttgatagatggatcacgtaaacgtgcatgggccaatgcaatatgatttcggaagctttctagttcataatcgttagatttaaaacgagaagcactcctcataccaccgatagctcctttgccgaagtttgaaccaatctgaataacgccagagttcattggtccttctgctttatataccggaactttagattcaaactcttgatatttcttagcggcgaagctatcaccctgaagtgaagcatcgacagtagaatattgagcttgtgctgctaatcgacgactaattttagttttctgaataacagcttgatccgtgcgcttatcattttctagagcaatagaagcggcaacagcaacagctttaggaacagcattacctgttttaacgtctacataaacatcaccaacctttgattcaacttttgtgaataactcagttgaaataggaggtacacctggaatgtcttctaaattagcatttttacgataaaccataatatatgcatactttttatcatagtcccagatttcctttaaaagaacatatcgacctgctcctttagtacgtactaaacggtcagcaataacttgcatttgacgagcagcgccatttgttttactttttagtacgcggaataggcatgcgtcaattttatactgtttcattgtttgaagagcggtatcaaaaaccgcattaatgacaccaattggatttccacccaagtttttaagtttaactaatgatagtttctcattaacacctatcattacgatatgcatcattttatcgcctggcttaacgtttttatttgtatcaccgccagaggtgtatgtacaaaatctaaatccaggaagcacactttcttcaccggcttgaatagcaaaaatttgaggtattttatgcttaggatttaagttaacaaccggcgccgaagcgccgtcaaataattctgtaataagttccatgatttatccttgaacgaacttgtaaggcatgtttgcaatatctatgcaagacgcaataattccaagagatgattctactttttgtttaacatttgatgaaacaaatgatgcaaagtcaactctgtcttctatttcaatatcacctgtcattgcaactacttcaccagtttccattagacggtcaccgtcataaattaccgattcggtgagttcttcggtggtcataacttcagcttgaatgagttttgtattattagacgtggttccgtcattattagaagcatcagttattttattaactttgaccatcaatccacgtggtagaataacttcagcttctgttgctattccgagacttcctggatatacaacattaactttatgagctccatcaattgcccatcctatttgaactttaacgtattcgggattttctttatacgctcttatttcgtttggattaatagttattccttcttcatttttatcaactgtcaattcattacgagcttctggttctaaaagaccaataccagcatgtgtaattccaaaacgtccaaaaatgataggagttaaagaagtagatacaaaatttctgaaatagaacactttatttttaactagtgcttcgtatataggagcagtcatgctttgagcacgataaactgtaatgccttctggtatacggtcaccattttcaaaagctgaatctaagttatttatagcagattcaatttctttttcactcattacatcatatcgttctggattgtaacgacccaaaagaagattattgatgtcagtatatcctgaaccacaatactctctaatgccgcgcttttgtgatggagtatatttagaaccatcacgggcaatagtaatatcaatcattggacctgcaccaattccagaaaaactataaatcattcgtttgaggaatttagtttttgctgcgttccaggaatttttagttatttcttcccagacttcatctggctgccctttacgagttttattatgtttatcaagccatttatctttgtattcttcaaagaatttattaacagctgctgcgtatttctctaaacattttattgaagtagttggttcatttttaatcgcattaagaattacatctttaattttttcagaaacttcattaacctcactttttgaaaagaatttatagtcataatgaagttcatctgcagttccttcagcaataatttttgctgccttagttttagaagccaatgaattaattccaagtttcatttcttctgcttcgggaattaaaggagcggtagcaggtttattgaaattagctgcggtagattcatacttctggaataattcactttcaaatctagaagattctaatgattgactttgtgcaattgctctacgggaaattttaactttaacgattacagcttggtcagaacgtttatcattttcttgcgcaatagatgcagcaattgcctcatttttagttacttgagctccagtatctttattgatataaacatcaccgaccttcgattcaactttagtaaagagctcggtactaatttccggaactcctggaatgtcttctagtgatacatttttgcgatgtataagaatatatgcatactttttatcgtaatcccagagttccttaagaaggacgtatctgccacctgaacgactgcggataagtctatcagcaataagttgaatttgacgagcttgaccagcagttttagacttaagaatacgaagcatacaggcatcaattttatactgacgcatcgtctgcatcgcaacagtaaaaactgaattgatgtaattaattgggcttggaccgagaccttttaatttagcaattgaacctttagcagttaatgtaaaaggaacaatatgcatcattttatcgcccatctttaaatcgcgattagtatcacctccagatgtataggtacataaacgaaagcctggttgttcaattgcgtcatcaacatgaactgaaaaaatttgtggtattttcttctttggatttaagtttgtaatcggaagagtagtatcttcgtcaaataattctgtaatgagttccatcatatcctctctagtgtttattctatttataaaattaaaggcccgaaggcctttaataatctattggtaagagagtacgatatatttcaaactttggacctttttcataggcatcaaatgtttctgtgaatttattataagcatatgcatctataaattcaatcataatttgtgatacagaagtagaaacatctccaccttctttttgagcaacgacaattgtttctaagtaagctttcatagaccagttacctcatgaaaatcaccaaatacatcctcgaatgtattagctttagttttatcttcacgtaaacgaatcgcaattggaagaaataattttacgtaatcagtgcggccatcagattttagccaaccgttgcattcgcactctagaatttttccaatataataattttggttttccataatgcgagtacggtcaagttcatgtgattttacaccggctttatcttttaagcctgaaccagcatttactttaatttttccacactctgattcaagaataaatccacctgctttagtagggtctttacggtgaggataaattcctacaatttttaaatcaacatcaattacttctttaaatttatagagattttttgaacgagcattttcccacaatccatcggtatttttgagaataataccttcaagaccttggtcaatatattttttataaattaccttagcttcatctaggttatttactacctggttttcaattaaaattactttatcatatcctgatgtcatttgttctagtttagaaaaacgtacatcatattttaaacgaaacgccggaagaccgtatatttctaccaacgggacataatcccagacctgaaacttcatgcatttggcttctttttcggaaatggttccttttaaggatttattggcgattccattagaagcagtacgagattccgctacttcggcgaattctttagctttactaatttcaggataagcatcaaaaagaaaatctaggccttctggttcctttttaacttgctcatggtataccaattcgccatcaattaacacaccttctggatgaatctggcgggcttcagcagtcattttgattaattcttccttaagaagatctaatcctagatattcattaccagctcgtgataaaagacgaacatcatctaattcatcgcctctaacttcagcaaaacaccgggctccatctgcttttaactgtgcaaaggctggaaatttgatattcttactaatgcccttttcatcataagaacttgccagcatttgaggttgttcaggaattaaacctggccaaactttgtttgcaatagatactgaagcaccgcattcaaggtctcgcatcatcactcgacgcaaaacttcaacatcatcctttttaccatcggtgatatatccagtcaattcctcaattgcagcatttccggtcaatttccgagtagctaacgtgaattcaatgaagtcaagcatatcggtaatagtcagcattccaaaactctgggtagcaataccaggtttaggccatttcttgatataatactgtaacccacgagaataagtcagacgatatacccgtttaagcaattcattatctttattcttttcaagaattgcttgcttctgcttagttgatccaatagatgctatttcattcagaattttaagaatcattgctcatccttcagagtttgatttacagctctattataaatcaattcatcattaagctcagttaaagacctatgatatgtagttctaactttatttccttgcatccagtgcttgatataaatgaaaccttgctctacacattttttaaaaattcgttcgtctttttgagctcggaattctggattgcatctaaagaattgatttacgtgaccgtaatcacgcgtagtattaccttcattttcataaatagtgtgaacgacaaacattagaatgctccttggaaaatattatcaccacaagtaggtctattatacaaatactctatgccaccaggtttaatatagttccatgtctgaaacggatgtgtctgatatggatgatatagatgattataaggattaaacccaggagttctccaggtagtgttccaacgaaaagaatcatttttaatcatcttttcaattacatcttttatagctttttcactatcaaaactttctttattttccttcggtgaaaaaagtttattttctacatcattccatgtataaactcgctgcgcagtttttggaatattgtcacgctctcctcgagccatccaataaacaggaacatttaatatttcactcgcatgatcgcaatggtgagcgagatcgtcaatataacaaattacgttatatttctcttttgcctttttgaacaactcttcttttgaagaatcatgaccacacatcaatacttctgagaaagcaccaggaaaaagagcattcaaattaaattgacgattcaacagagcgtcaatagaatcacccaatgctgtaacagctacaaaattataatcttcttttaatttgttaattacacacagtgcatctttatatggagacaaataacgaataaaatctgatcgattatatttttcaattaacttgacaccaagttcttcatcacaattaaagagtttacccggagaaataaatttctcatcttggatcatttttaaaatatgttctaacggaagattatatttctgagcaaaataaggaaggcctgattgccagcttaaacatactccatcaatatcagtcaaaatagtaggcttcatagagagtctcttaataggtttaacacatcaataaattcagcttcggttagtattgtatcatcttttgttagaccactagccatgctgtgcttcaaaacttttcctttcgaggcttgtaatgcatcacgaaagcccctgttttggatcgctgcttcaaaatatgcatttgtgtataattctttccacgccggggagtatcttgaaaacggaactccaagccagaacaacgtgccacgatcctgagctctagcataagaccttccagcttgttgagcggcaagcccggataacccaaatatacgtctttgctgttcaacatttttcaccttacacccttggaggaatccttcgagacctccaaattgaataccatccataacgaaaggccattgggcgaaattacttaatgcacatgatggccatttaaaattgcttcttatctctagctcagacattttcaatacttataatttcaacatcagcccaatgaccatagcaaggaagacgaaattcaactggccagttagggtccttttctaatataatagactgaacttgtggctcttcatattcatcggtatacggacctttatacgttactttatatgtgaccttaatgtactgaattccaaaaatcttattaattatattcatactaattcctttaatccgtaaataggagataattcatcacccatacgaaggtcttcatttccatctacccaggaaacaatataagcctcttttatttgaataccactccatttaaatggaggtagaaccttagaaattaatccaggtataccaactccctttaattcaacagtttgacctaaaaagaatttcattagaacctcatctgaaaaccatgcgatttaacattaccgccgccaatatcagaaatgttaatttcacgcgcaattgaagggtcaatgtcaatttcacgattaagtttagtgatagctaaagtatcgcggccatttacagtacggaactctaaagggcagactacattaacatagtttttaatcgattcactagtaggctgcaaatgagcaggaaggtctttaggtgccttagagaaaaccacttcacagaaatttttgcgggtatcaaaataagtagtcataaacatagtattttcctcagtaaggggccgaagcccctcattttattttaaatatcaaattcgttaagaactacatcaaagattgcttccagatgctcaggtttagctctgttactcagaatatgacgaatccaagttttaaccagaagcttgcgattaacgccattccagcaaggatgagtccctaaatcgcgttgacgaaaatcatcatccaatgcgattttaaaagaagaaccttctttcgtgattgaaaccgtgatgccattttcaaatcgcatataaacgtagttaggagtcatatactgttcaatttcgcatactgatccattttgatgtttccaaaggcagatagtatcaatagaacctgcaataccgttagaaacatatttacgttcaaagttgatgtaattcatttttattctccgagatgtttaattgcggtacaggtatataatatcatatcctgtaccaaagtaaactattttatgcaactttaatccaattatctaaatttaattcacctttggctttcattttttcaatcaagaggtcagcggtaatacgaccattttgataccacgtaacatcttcagagtaaccagtttctttatcttcataagtctcgcagcgaattttaccaagaatcaaagtttttaattcgtatgtatctccagtaaaaaagttagttaacattattttccaagagaaatcatcagaaggaccttcaggagtcatacaatctacgaattcaaattgttctttgtataagtgccactgaagttctttagtttcgatagctttatagccgtcgtgatctttacctttgatgtatgagttaagattgattttcattttattctcctttgtttgtgtaagataatactatcacaaaggaaccatactgtaaacaactttgtgcaatctttggaaaataaaaaaggactcccgaaggagtcctcaacttatgctttctgcttaccaaaacgagaagcatcatctcgaagaaccgcacgtgctcggcgcatgatcttctcaacagtttgattgatacgagagttcgacccacgcttgtaaccagcgcgtttagaatcaccaactttcttttcaactgctttctttgctttagcttgttttgccattataaattctcttttaaatgaaaatgcaggacttattggcattgcctgcgcaagcctcaaggggtacttaggttttgaatatttaccgacaggataaccataaacctcgtcaacataattacttcagtgttaccacaaagtgacgaactgcttttcgtgcagcagaagccagaggcttagcatatttaagttcatctttttcctgaagctcagcagctaatgcagtttgagcaggattcagatgtttgaaataacgcaggatttcaagagcttcggcttcaacatcaatagaagcgccatagttttcgtgaccattattccatgcgtttcgttgcagttcaagagcgtgttgtaattgtttaatcatttaaaaattctcgttagagattaaaactcggtagtcacgttcttctgaatttcatcttctttcgacagatctctcagttgtagactaccacatagaattgttcggttaacttattattccgacacccaattcatattattatttatatcacttataaagacacggaatagctttatagtgacaagtaacgaatttttgtttaatttcttttggctgcttaagacccagagctacaaaaggatgcggaacatttcgaatttgaccaactggaagagaagtcaaatcaccaacttcgcaaaaacctttaggaacatcaggaccgacagagtgaactacacacagttcaggaacttcaccttgaacacgtttaccgatgataagtcctgattctgtaacttcttcatcaccggcttgtgcaggttcagaaactaaaataacatattcaccgacagcacgaattggtagctgttgtacttcagacatcgtttttcctttttgttaacagatgaattaataataacaaataattcttaaagcatttatttaccaataaattgaagcaaatgctcaactttcatgccattaacggaaatcaatttgtcaatagaaaaacctcgccatgcaccgagttcaacatcaaatatcggaatcatatcagtagattctttccgagtagattcagtcaatttaccagtttgcatggttggcataaagtcagcatcacgggtgcctttcatagtacgaatagtaccatcagacttttcaaaaactacatttgaaatacccatggacaatttagttttcaaaatttcacgaattgctactttttgttcagtcgtcagtttcatttatttacctattacagttttaatatgagttgttccacgttctttaagagtggaaagcaatttttggcatttttctaaatcagatttccaactatacggcctatcaatacaaacccattctgacttataatactgtttccatttagagaaaaaatatttcttatactctacagcaaatgaaatgttctcgttagaataagaactaattgctgtgagctgtaccaaacgaaatttcattattcaccacagaattcgttgatattttcccaatttaacttatttaagtttttcttaggaacattaaacacttcaatacccgcatttcgcagaatatcatcccagccaggtttatttttatcgtatgtttcgcaataaaccagctttttaattccagattgagctatcgcttttgcacaatctgggcaaggagaaagtgttacatacatagtagcaccttcaattgaagaaccatttcgcgcagcaaacaaaatcgcatttagttcagcatgaatttcatttttagacgaccactcagagtgagcactacgatgttctttcgccaagacaaaacgatcagttgaaccaaatgatacacattcaggcttatgaccttgaatgatagtatgtttaggcttattcagcaaccaaccttgctcagcagcataatcgcagcaattcacacccccggcaggtgaaccattatatccggtagaaataatacgtccattcttttcaattaccgctcctaccttccaggagcaacattttgattcttgtgatactaaatatgcaatttgaagtactgtactcgctttcatttcataatcaccagataagcagatttagcagtttcaacacgataaatttcgtgacgaagtttagttatacttttaataacagaactaattatattctgcccatctttaaagcggtttttcttatcaataaaaattgcaccagccatctttttgtgaagctcaactggatacttcgtcacaataatagcatcatacacagaaggatgaatactattcactagagtatcattcattaaagttattctaatgaactgtgctgtttcagaatcaagcgctctatgatcgccagtatcattttcaagacaattatcaattatatcagttaaattcatcatagtacgccatacaccctttgtgcttcaactaatccatcaaaatccagtttaagatgtgttatttgatcaccatcacctggattcacaattactaatactgaacgaggagtttcggtaataacacgaaccgatgtttcaggaaatcgttcagaaaccttatttaccaattcctgagcaaatagtttaactttttcttggaattctttaacagtaattggtttttcacttagcatgttgatcccagctccttactttcaacgtttttaactaatttgacagaaactaattcggcatcttgggtaatcattaccgggccttcttcatactcttcaagatattctagagctttctttttagcttcttccttcgtatcagtttgagcatagatatagaacatacaaccagtaatacctactactttccacttaatttctttatcagttttaatttcaaatttactgatagagtcatctttttgaacttcttcgaaaaaataatattctgacatataagtaattgaaaataacgggctatctttataagattcgcccattacatcaacagctttataccagcagtcatcaatttcacgtttaatgctaataacatttttcgcagaatctatttttactttaaatgaattttccccaataaacttggcaattcgtttattagccccgcaagtttcattaaaaatatctttatatccagctttaaagcgataaaccttatcttcttcaaaccatttgctcatttcaatttcctcatttgttttggtagagctataatatcacaactctaccgtaaagtaaactgttaaattgccttgaattctgatgtctgtgattcaaaacgaatatcgcctttgatgactagctcagcatcaagaccgaatacgacaatgatatgtgcggaacctggatacagcgtaatggcaatagaatcaacctggtctggaagcaaagtattcaatacatgagtcacttgagcatgaattcgaagctcgactgcgttatcaagcttttcaaacatattattagcgataatttggctaaacactacttctacgattttagaataagtcggaaacatatttacctcacataattttcttcaagccaatcaataacatccaacgcattatcaaaagttgaaccatctactttatcttctgtttcataatcaagaacatctaagcctactcttccatcaacaataggccataaacaaaatagatatttcttttctttttcaattttatcacaaagacgataaatcttttctatattattcataagttttccatggtaaaggcagtttagttttctttactgttagttcaatatcaggattcttttctcttaatttaaggcattcctcccaagctctgatttcactagtgaatacacaaaattgcccattactagtaccaactaaaccactatttacaataacaatagaccaagtttcatgatgccacgccattaaaaatctcccgagtcaacttgccagcattcaacaccgatgcggcgccacatttcaactacttgagttcggtcatcaatagctaatttcacatcaaaatgcggtgcgatgtgtttccagaaaatttcttctttgactacatcatctttacgggtatcgccttgttcgcgttgacattgcataactaatggaacgccagcaatatcctcaacccatttacgggtcatacgataatatttcgttgggtcttcttcggttccactttcacggcctgaaacgactacgatgtaatatccttgcttatcgtacatcttagctagttcaacaatcataggattgataacatcagtatcacatttttcaaggtcataaggaccacgaccattcattttggctagtgtgccatcaacatcaaaaataactgcttttggtttgccaggagtccctttgtataccggaagaccgagatactctcgcatgcttttatacattgagcgtaaaacatcaattggtactgctttagttccacgctttgagttacgtttaaccaattcagtccaaggaacatcaaacactttatattcaactttccagccgtattctttggcaaaagtttcccatgccaggcgccgttcgggattcaggttagtatctgaaatgattactcccttgacagaatcaccgccatacagaatatttttagctgtatcaaactgcataccagatacgatgccttctttctttttggtatacttatactcatcgcgttcttcatgtgccataatagattggcgatagtcatcacgattgatattataaaatccaggatttttagcaataaattcacgagcccaagtactcttacctgaaccaggacatccaacagtcaaaataatctttttcatcatttaattcctaagaaaacttcaagaatacgaatattatgctcacgccgccctttatataattcagctgttgattgattcaccgatttgctctgaacattagatgaaataaattttatcatgtgatttttaagctgatacatatcaagcccacgggcttttgcttcttttcgtaaggctttaccagcatcatctaaagctttcgcagggtcttcatcatttaataccattccacgatccaaatccatgtatactgcaccgtggcacgcatcaatgtaccggtccgagcactcaatataacgttctaacagagttttcatttattatttctcaaccaatgattgaatataatcatgcaagtctttagatgctttaccccacttattttggtattcatttttaagattagcccgagattgggctaataaaacatcattagttggaggtaaagattctaatcgttgaatctggcgtccataaatcattgcagccatctcggattcataaatcaatcctttgagatgttcaaattgatgccatgaaatcatttgcatttatcctcttttagctcttgacgataataacatatcatagttttttggtcatgtacatatcgttttacatcattaagccaaatacgaaattcctgggaatcttcaaatggcataccgacccaagctttaccatcaataactttaacttgccaagatagtttagcttcatcatatgactttatttgtacaggccaattaggatgaactgtttctttctttacttctagaggctttgtcgaacaaccaactagaagaccaatagataatattactgctgatagtttaatcatttagaaaggtcctggatgtcttctgcgaacttgttgaaggagttgttgatttgttttttaaccaatcctggcttatgagccaccacatccgccttctttgcgtctttgcgcagtttttcattttcacgctcaatagcagcaattgcctcacgatttttattattcatcgcatcaatataattatactgaattcgcaaattatttaatgctaaagcgttttcattggccgtttttgtaatttctacaacagacgtttctaatctttcaattttattttttaaaattaaagaagttccgcccaatgcaattacaattaataacaagcctgttgtcgtattacttaattgcataaagttttaataacctctataatatcgtcttgagaaagaccgttaattaaaatatgatgttcagcaggagatttagaaattttaaagcatgcctcaacatcttctgccatatctgatgcgctacgatttggattactaattccaagacggtgttttcccgttaaaggattaacgatgatatagcatttacagttgttaatatgaacattaggttgagtctgattaatgaacacatcacaatcatatttcgcaagctgattttctaaaaagactttcatctcctcaaccgcatcaggaagcatatcacgggcttgctcaagacgacgatttcgatattctttaatggtcgttttccgctttacttgcttagctaaatctttcttaagatcggtgatatatccaactcgacgatttcctttaaatacagaaatcccatctgtagtatcaccgtatgcttcaacgaccatctcagtagtaataagctgcaaatccatcataaagtcctcatgttatgtcagtaagattactataacacaacacgagggacttgtaaacagcttagtatccttctgggataaattttttataatttttcaaaaaattctgttcgatttcacacataaccttctcttgactatcatacccttggtagaggctcatgataataccgaacagatgttccattccagcacctttagcaacaccttgcgcttccatcgcataagtctttctatctttgccgcaatgcttattgtgacagtcaagaactaaaaacagagctcggtctaagtacttcagataagtcgtttcaaatgcttcaatttttctatatgaatattcatcgtcagcgtacattgctttaagatcatctgatgcaccatcaataatagtcttaaacaatttttctggattatctaatgaactttttgtactgtgaagagacacgtaccagtcagacttaattttaaaatgagaaccatctttcatcacagcaacatagccttcgatgttttctgcatttttagcttcttcgacccatttaggactatcgatttcgtatcgttcaactagatatggacgaagaacagcatctttataaatatcatcatatgaaatgtattcgcctgtttcattttcacgaatattcaataaaatgattttcatctcttgataagcaagaacgattctattagttggagcgacgaattcgaagttagcagtaaatccatcttcagctaattctttaagtctgtcgcgcaactggtgatgattaatattcatcaaaattccattagccattaaagcctgttcagatttgattgaaccctttgatttgaacagaatttcatcaccgtctaaataagttgataccaaagacccatcttcttttgttagaatgtaatcaacatcatttaaatcgatattcatcgtgaatggattttcattcaagttaaaaaacttttccataggacgagaagcgattcttaccggtttttctccatccatttcaaacataattccacgacattctaatgcgtctggaagtaaccaatcagaataagatgcgtaattatatgagaaaattctgtaagttcttccagatgcacttacatcatccgagtaaaaaaacttacgctgtgagtccttacatagttccattaaattgctaaaaagttcttgcattgtgtatcctcttttgtgttttgaatatagtaccacactccatgtggaagcatcattttttcttatgttgaatattccaaggcgggttaaatagcttaatgaatagtggctcctctaggtcaatcgttgcgattgacattgtacctaactcatttgtcatagaaagattaaaacattggcgggcgtaaaattcaactttgcttccttcctttagcgcagcatgaattaatgcagatttagtagaatcagacgttttgtctttacggttaatagcagttctataatagtttattcttttacgtaaatttttagtttttccaatataaacaagctcatcatttatagcaatagcataaattacgttatacttgtttggaatagataattgttttatacttccgttatcgtctaattctagctcagtatatttaataaatgaatattctgttgcaatttctttcataataaaatgggccttgcggcccactccttaaaaatattttttaaaactcatcataactttatcatcaacgtcgttatcaatctgtgctacaagataagatgacagttctacttcttgtggcgcggattgaacattatcagaattaagatattcacgaatccaaggatatggatgtttaaccggagcatcggtaattgggcatggaagaccgcactgtttcatacgagatacagttaagtaatcaataaagctccacatgctatttgtatttaatccaggaacatcgccatctttaaataaatgaactgcccaatctttttcttggcggttaacttccatgaaaatatcaactgcttcttgttcacactcttgagcaattttaacccattcatcgccatcagtaccggattgaagttgacgaataatatattgggtgcctttaaggtgaagctgctcatcacgtgcaatgaacttcataatcttggcattaccttccatgatttccatgttcttatggaagttaaaggtacatgcgaaagatacataaaaacgaatagcttccaatgcgttgattacatgcaggcagaggtaaagagatttcattagtgctcgtttagtacattcaacaactttgcctaactcttctttacgaaatccttctgataaaattccttcataatcttcaaccgcattctgatattcacgagtcttaactagaacgtcatcataataacgaccaatagattcagcgcgtttcatgatagctttatctaatacaatctcatcaaatacctttgatggatcagtataaagatttcgcataatatgagtatatgaacggctgtgaatagtttcgctaaaagtccatgtagcaacccatgtatcaagacttgggtctgaaattaacgacataagtacagcagacggcgcacgaccctgaatgctatccaaaagtgattgatacttcaggttattagtaaaaatatcttgctggtattgaggaagcttgttaaattgtgcagcatccatcatcaagtttacttcttcaggacgccagaaaaatgacaattgcttttcggttaaatcttcaaaaactttatggcgttgaatatcataacgtgcaataccaagacctgaaccgaagaacataggttcttttaaaacatcaactggatttgtattaaaaactgtgctcataaattttccgcttagttaatagatagtgactcgtccgtgagtcaaattatatcataatttacaggatgaacaatcttcagcttttggagtttctatttcataatcatcagtaccagaaccgtcacgggtattatgataatagaaattttttccgccaaaataccaaaaatacaaaagatcatcaatcattattgacattggaacctttccttttggaaaaatctgcgggtcataatatgtatttgctgaagctgattgacacacccatttaagcataatagctacttgcgtaagataaggtttattaccttttttagctaatttccacgtataatcatagaggtctatgttatgctcaatattgggcacgacttgattaaaggaaccctcttttgattctttaacagagactggtccacgtggaggctcgataccatttgtactgttagaaacttgggaagatgactcacatggcataagtgctgataatgtgctattacggatgccaaagagcttaaggtcttcccgcagcgacgaccagtcacaaacgtattttggagctgcgatttggtcaatctttttattgtaccagtcgataggtaattcgcctcgagaccaacgagtgtctgaataatattcgcaaggtcctttttctttggcgagcttaatggatgctttaatgagtccatactgtaatctctcaaatagttcatgtgttaaatcgttagcatcttcataagaagcaaaattacttgccagccaagctgcatagttagtaacacctacaccaaggtttcgacgctttttagctttttctgcttcaggaactggatatccttggtagtccaaaagattatcaagagcacgaacttggacttctgccaattcattaattttatcttggtcttgccagtcaaagttatctaacacaaatgcagataatgtacacaatccaatttcagcatcaggactattcacatcatttgttggaatagcaatttcacaacacaagttactctgacgaataggtgccttttcacgaataaatggagtatagttattcgtattatcaatgaactgtacataaatccttgctgttcctgagcgttcagtcatgagcaattcaaacagttcacgggctttaatgcgctttttacgaatattagggtctttttctgcggcttcgtataattcacggaaacggtcttggtctttaaaataagaataataaagctcgccacccatttcatgcggactgaacaaagtaatgtaatcattctttccgaatcgttccatcattaggtcattcagttgaacgccataatccatatgacggatacggttttcttctacacctttgttatttttcaaaacgagaagattttcaacttccaaatgccaaataggataataagcagtagcagcgccgccacgaattccaccctgtgagcatgatttaacagcagtctgaaaatgtttccaaaaaggaataacaccagtatggcgtacttcacctgtgccaatcttagaaccttcggcacgaatcataccaacgttaataccaattccagcgcgtttggagatatattcaacaattgaagcggaagccttattgatagactttaatgaatcacctgcctcaataacaacgcatgaactaaactgtcgagtcggagtacgacagccagccataataggagttggcaatgaaatctgtcgagtagatactgcttcataaaaacgaataacgtgttttaatctatcaacaggttcatcttgatgcaatgccattccaatagtcataaatgcaaactgcggagtttcataaatttgaccagtggttttatctttaacgagatatttttcttttaattgcatcgccccggaataagtaaattccatatcccgctcgtgcttaatttttgattctaaaaatgtaatttcttctgctgaatattttgacagcagttcagggtcatatttaccttcatttacacagtaagaaatatggtcaataaatgaacgtggttcatattgtccgtaaacatgcttacgaagagcaaacattaaacagcgagcggctacgtattgataatcaggctcttcaactgaaatagaattcgcagcagccttaattacaatggtttgaatgtcatcagtggtcattccatcacggagatatgatttaatattttcatataattcataaggatctacagatgttccttcagctgcccaggataaaactttaataattttttgcgggtcaaagctctgagaaacaccactacttttgataacattaattaattgcataagtcctcaacttgaaaatcgtctttaaacaatcggttaactatatgagctattatatcaccatgacacggctttggtttacatgtgcatcctagcctcattccacgtaaaggctctaaatgtgctttagttatttctccggatttaattcgacgtataaaatcttttttgaataattcaatggcagcctcccggctgccagcatctttaccaacgtaatttccccaaaatgtatcacggtgaatattaacatcaaagtcggatttatatttattcactacccggcatagacggcccgcgtggtaataattcgtcatattgtttttccgttaaaacagtaatatcataataacaatcagaagaagttttaactgtagaaattttattatcaaaatactcacgagtcattttatgagtataatattttttgccataaatgataataggctgttctggtcctggaacttctaactcgcttggattaggaagtgtaaaaagaacgacaccagaagtatccttaaatcgtaaaatcatatatcctctcaattaaattaaaattacaccgccatctttcctttcaatacaccgtgggactgataatctttgagaacgaaatcccgtgctgtcatatattcagttaaccaatacatttgagtttcagtatcgcattgactgaatccattaggccaattaatactgagtttgcatagatccataggagttctatttaatatctctttgcattgctcaatatggttagaataaatgtgtgtattaccacccgagaataccaaatcgcccggaactagttcacacatgtcagcaacaatatgcaaaagagcagcataactcgcgatgttaaatggaagaccgaggaaaacatctaccgaacgttgataccattggaggtcaaggtatccgttacgcacattaaactgatagaacatatgacaaggaggtaatgccatctgcttgagttcagctggattccatgccgacacaatttgacgcctatcgttgggaaatgttttaatacgattaacaacttctacaatttgatctacaccaccaaaatcacgccactgttttccgtaaattggaccaagttcaccgctatgataacctaagtctttggcctggttttcgtagttttcatcccaaattgtttttcctgcaattaaagatccatgagtacgttgacgtaaatcatttacgttagtacttcctgataagaaccacaataactcagaaatacatgcattccaggcgagcttcttagtcgttactgcaggaaaacctttagttaaatcccagcgtaatttagtaccgaacaaagcaattgttcctgtgcctgttcggtcatcagtttcatagccattttcaaaaatgtctttaattaaatcttggtattgtttcatttagtaccttatataaattataatacattttatgaagctaataatcaatacggtttagcatcaaattttctttcgatttcaggagtgaaatataattctttaccacgtttggaaaaacgaccaataatatgataattattctcatcaaacgtgatattaccaatatccatagctttcaaccaaatatcgatatttctatctagttttatatcaaaattccaatacggagaactattaccaaaaatactacaagcggattcagtgaaacaactgctataaatcttgtctttaggaactactaattgatagacgcctttaataaactgaggaccctgccattttggttgtttcgcgtctttttctaatagaatagggtaataattaaaattcatattttccgccacgtgttatttcatttatatactgattccgtaagggttgttacttcatctattttataccaatgactttcaaccatttcacgtttgcttatatcatcaagaaaacttgcatctaattgaaccgttgaattaacacgatgccttttaacgatgcgagaaacaactacttcatctgcataaggtaatgcagcatataacagagcgggtccgccaattacactaacattagaattctggtcaagaatagtctcgaatggagaaccagaaattgatacttgaatttcgtcgccggaaatgtaatctatatattgctcccaagtaatatagaaatgtgctaaatcaccatctttagtttcaggataatcacgcgcaaggtcacacactacaatatgtctacgaccaggaagtaatgtaggcaatgactggaacgttttagcacccataatcataattgtaccttcagtacgagctttaaaattttggaggtcctttttaactcgtccccatggtaaaccatcacctaagccgaatgctaattcattaaagccttcgaccgttttagttggagaataagcgaataccaatttaatcattacgcaaaacccctttcaataaaccattcagtggctttattagcatcaaagaataattcttcatatgtcttttctttgttttcaaagactgtcacacaaacacgttgacattctccgcagtattcttctgacatactcaaagcgtcagaaaacatttcattaaattcatttaaatcaggattatgcaatgcgttaaaaattgcataatcaaattcatcattcataaattcaaatacaaaaatcatattatctcctattaaaaaggatcaggaacatatccactagctttaatcattttaactaatgttaccattcctttgttaactgcttgtgagatttcatcaaaaacttcatcattaaaaagttctagcacacccttctgaacttttaatttacagccaacaatttcgtcatcgcctatagtaaattcattaccgccaattccaccgaaaaacttaattaccccagttaactgtcttccacgagaatatgggtcatgtgataaagtaatatgagtcaccccaggtacagttttaaattgacagcgaatatttacttgagaaattccagttacatgaatgtcagacataatattttcctcaaacagactttttcacaattttccaatcagctttaaactgttcaacgtcagaatggtaaatccagaatcctgcgctttctccatcctcataaagagggcatccatcacattcatcttcccaccccatgtcacgtaaaagatgttcagctttttcaacgagttcagaatctttaccgatgatattaaaataccatttacctttaacttctgaatctttgatgctctgacgttgtaatctcattttattctccttagttgatagggtaatagtatcacactactacccttctgtaaactactttttgaaagtttttcgcaaaagttcaatgatttcatctacattgttttcgtctacaatgcagtgaatttttgttacgccagaaactataccttcattagcggattgaggcttttctaaagttacctcagtaaagtatttgaattcttcagagtaaatctcaaaatacgtctcaagtgggccacccgccatgtattcagtgccatcttccatagttacacgtaccacacattcaccagcacaatcatcactttccatttcatctacaacaaaactaggtccgtgcttctctattaaatttagcatcattacattgcaacgacactcgttagcaaagtcatttttaaataaagggttaatgatataagtttttccaacttccattttgatttcctcattttaacggggctatcaaatagccccttgataattattgttcaatcaatcccatgtaaaattctgcgtcttcagaatccatgccatcacaatattcattagccataaagcgggtgaggtcttcaagaggaccttcaataacgatttgaatactccaaaacttagaatcttgcacgcttgtgatactaagttcaggataacgattacgaataatttcttcaatatattcaaaatcaacgatgtcaatatcaactttagccatattattttcctctttaatcatcagcagtattgccgatagttgtatagtaccacggaagaacaaggatgtaaaccgttttgtgaaaaaaatttttgaaataaaaaaggggaccctagaggtccccgattaattagtaatataatctattaaaggtcattcaaaaggtcatccaggtccgtgtcatcagcactagatgaactaccagagcttgagctcataaaatcatcttcagtttttgtattgaagtcatcaacattgaatgcatccaaatcatcagcaactttatcagctttcttagcagcagttgcagcggcaccgcccatcacagcagttcccatgacttgaccgaatttagtgctcagttcttcaaatgatttgaatttatctttagaagtcatttcagaaaggtcaaccatttgttcgaacagttctttctggaaagattcatcatcaatgtttggaatcgcagattgattcaggaatttagattcgtcgtagttactaaaaccagaaacttgtttaactttcagtacaaagttagcaccttcccacggacaagttacatcaaccggagtttcacccatttcaacatcaactgcaatcattgcattgattttatcccagattttcttaccgaaacggtatttaaatactttaccttcgttttctggagcagctgggtcttttactacaagaatgttagcccagtaagaagttttacgtttaacaagaccgtactctttattgtcagtgttgtacagatcatttttactgatgtactgacatactgggcaagaatcgtaatcaccgtgggtagatgaacagttttcaatataccatttaccatttttcttgaaaccgtgatttacaagaattgcgaatggtgcttgttcatcatttttagacggaagaaaacgaattactgcttgaccgttacccgcattgtcgagtttcagtttccactcgcctttatcttcagaagaaaaaccacctttatttccagccagtttagccatttgtgcagcgagttcagcagtagatttacgtttaaacatttttatttcctttttaatttaattaacagttggtgctatgacgatgtatgacctcatagctggtcagtgagataattataatttatttataataagcaattaatacttacaagatttcacagtttcaataaaaacttttttagcttcctgtgaatcgatatttaaaatttttctataagcttttaactttatagaataattgttccaaactaaattatcagtttgttcatcatgtttatcaattatatttaaaaatgaatcaagcaagataaacgtctcaaacgaaattatgttcgattgcagaagtttaaaaatataacttgattgaacttttggattatattcaaaaatttctttaaaagcagaaacttcaacttttttactaaaataataaatgttgcgaatatcttcttcaaacttaaatttaatttgctttaagcgtccgatatattcacgataaaacacaagtgcatcagcgtcagagatgtcaccaatccaagcatcttggttagcaaccaaattgcttataaagattaaagcaagttcctttaatttatatttttctgataacttctggaaaaaatacttatcccttcgcttttgataagcggcatcagacacccgcatgcaccaattatacttaataacatcatactttccattcatatgctgttttatcattaagtataatttataaactgatttaccatcaatatatctttcaccaccagcaggcatgcggagtttaatcatagcagaaaatctaatgtattagttttttcacaacgaacaacagaaggacgtaaaagattttcgtcaatagcttctgactgaattttttcaattatacccgaaggaataaatttagcaaattgagtttcaggaatagaattttcttccaagaatgctgttgtagcttcaagataactcattccaaactcttctaccattttttcaataataaatccattttcttgacgatcaagaagctttgctatttcatccttttctttcttaattgaaagttctttttctgaaagacaggtctcatcgaccggacgaatatcatttagagaaaactgtgtcataaagttcaactacctcttcagtttcagcttcaaacacatcacggttatctttatgatacaaagctaatagacgattaaacatcttaccatcaacgccaagttcatctttagcacgaattcgaatatctttaatcagttcattataaccggaaattttcagtttatgatcagatgcttctttaataaatttagccaagtcttcgccatggatagcttcatcaaattcaaccatttcttttttagccattattcacctcaaaattcattaatgctattagttaatttagaaagacccgcttttacaaaatatgaataaattttgccacgcggtggtaatttatatgaattatagtaattcacaatgtttgaagcaatattatcaggaatataatcaaaatcaattagaactaaattttctttataacgattatattcagattctgtgagaagcaccttagcttgctcacggtcattagcaatagcttcaacaatagaggttttcattgaaggagttcgttcaccttcaactctggtaaaccagaagtcagatcgtactttaactgaagcaacgttatcctttttgtcacctttaaggattttagtcatacagtcaatttcagcagaaccgcttttaattttaacccatttcttgtgcatcggtgaccattgcttaacatttgggtatttgtgaagttgagtaaagtcaccatccgacgaaatgattaaaatcttatgtccttctaaagagaactttttaaccaaaacagcaatatggtcatctgcttcatacttatcaatatccataacgatgtatggcatataagctttcaattcatctataactttatgactggattcaaaataaccttcccagtcccaagtagattcttctcgtgcttttccacggtttttcttataataataagcaaaatcacgacgccagtatccagatttcgcgttatcaatacacaatacaattttagtgtatccaagagtttttgcttttttgacattaaacttaattgagttcaatatcaaatgacgaaccattgataaattaattttttctttatctgggaagtttaccaaagcagttgaaagcgcaatttgactaaagtcaattaagcagattccttctttgtaatcttcatccagcatcatttctaaatccatatgaacctcgttcaattagtgagatttctattatataccatccgaatcttaaagtaaacaagtataaatacttattattgaaaacacaataggagcccgggagaatggccgagattaaaagaaagttcagagcagaagatggtctggacgcaggtggcgataaaataatcaacgtagctttagctgatcgtgccgtaggaactgacggtgttaacgttgattacctaattcaagaaaacacagttcaacaatacgatccaactcgtggatatttaaaagattttgtgatcatttatgataaccgcttttgggctgctataaatgatattccaaaaccggcaggagcttttaatagcggacgctggagagcattacgtaccgatgctaactggattacagtctcatctggttcatatcaattaaaatccggtgaagctatttcggttaacactgcagctggtaatgatattacatttactttaccatctactccaattgacggtgatactatcgttctccaagacattggaggaaaacctggagttaatcaagttttaattgtagctccagtacaaagtattgtaaacttcagaggcgaacaagtacgttcagtaataatgactcatccaaagtcacagttagttttaatttttagtaatcgtctgtggcaaatgtatgtagctgattatagtagagaagctgtagttgtaacaccagcgaatacttatcaagcgcaatccaacgattttatcgtacgtagatttacttctgctgcaccgataaatattaaacttccgagatttgctaatcatggcgatattattaatttcgtcgatttggataaattaaatccgctttatcatacaattgttacaacatatgatgaaaccacttcagtacaagaagttggaactcattctattgaaggccgtacatctattgacggtttcttgatgtatgacgataatgagaaattatggagattatttgacggggacagtaaagcacgtttacgtatcataacaactaattcaaacattcgtccaaatgaagaagttatggtatttggtgcgaataatggaacaactcaaacaattgagcttcagcttccaactaatatttctgttggtgatactgttaaaatttccatgaattacatgagaaaaggacaaacagttaaaatcaaagctgccggtgaagataaaattgcttcttcagttcaattgctgcaattcccaaaacgttcagagtatccacctgaagctgaatgggtgactgttcaagaattagtttttaacggtgaaactaattatgttccagttttacaacttgcttatatagaagattctgatggaaaatactgggttgtacaacaaaacgttccaaccgtagaaagagtagactctttgaatgattctactagagcaagattaggcgtaattgctttagctacacaagctcaagctaatgccgatttagaaaattctccacaaaaagaattagcaattactccagaaacattagctaaccgtactgctacagaaactcgtagaggtatcgcaagaatagcaactactgctcaagtaaaccaggatactacattctcttttgctgacgatattatcatcactcctaaaaagctgaatgaaagaactgctacagaaactcgcagaggtgttgctgaaattgctacgcaacaggaaactaatgcaggtactgatgatactacaatcatcactcctaaaaagcttcaagctcgtcagggttctgaatcattatctggtattgtaacctttgtatctaccgcaggagctactccagcttctagtcgtgaattaaatggtacaaacgtttataataaaaacactaataatttagttgtttcacctaaagccttggatcagtataaagctactccaacacagcaaggtgcagtaattttagcagttgaaagtgaagtaattgctggacaaagtcaggaaggatggacaaatgctgttgtaacgccagaaacgttacataaaaagacatcaactgatggaagaattggtttaattgaaattgctacgcaaagtgaagttaatacaggaactgattatactcgtgcagtcactcctaaaactttaaatgaccgtagagcaactgaaagtttaagtggtatagctgaaattgccacacaagttgaattcgacgcaggcgtcgacgatactcgtatctctacaccattaaaaattaaaaccagatttaatagtactgatcgtacttctgttgttgctctatctggattagttgaatcaggaactctctgggaccattatacccttaatattcttgaagcaaatgagacgcaacgtggtacacttcgtgtagctacacaagttgaagctgctgcaggaacattagataatgttttaataactcctaaaaagcttttaggtactaaatctaccgaatcgcaagaaggtgttattaaagttgcaactcaagctgaaaccgtagctggaacatcagcaaatactgctgtatctccaaaaaatttaaaatggattgtgcagagtgaacctacctgggcagctactactgcaataagaggttttgttaaaacttcatctggttcaattacattcgttggtaatgatacagtcggttctacccaagatttagaactgtatgagaaaaatagctatgcagtatcaccatatgaattaaaccgtgtattagcaaattatttaccgttaaaagcaaaagctgctgatacaaatttattggatggtctagattcatctcagttcattcgtagggatattgcacagacagttaatggttcactaaccttaacccaacaaacgaatctgagtgcccctcttgtatcatctagtactgctacgttcggtggttcagtttcggcaaatagtacattaactatttctaatactggaacggcaactcgtctgatttttgagaaaggacctcaaactggaactaacccagcacagacgatgactatcagagtttggggaaatcagtttagtggcggatcagatacaacacgttctactgtatttgaagttggtgatgaaacatctaatcacttttattctcaacgtaataaagctggtaatattgttttcagtattaatggtactgtaatgccaataaatgtgaatgcttcgggttcattgaatgctaatggtgttgcaacatttggtagttctgttactgctaatggtgaattcatcagtaaatcagcaaatgcttttagagcaataaatggtgattacggattcttcattcgtaatgatggtggaaacacctatttcatgttaactgcttctggtgatcaaactggtggatttaatggattaagacctttagccataaacaatacatcaggtcaagttacaatcggtgaaggattaattgccgcaaaaggtgttacgataaattctggtggtttgactgttaactcgagaattcgttctcaaggttctaaaactgctgatttatatactcgtgctcctaccgctgatacagtcggattctggtcaattgacattaatgattcagctacatataaccaattccctggttattttaaaatggttgaaaaaactaatgaagtgactgggcttccatacttagaacgtggtgaagaagttaaatctcctggtactttgactcagtttggtaatactcttgattcactttaccaagattggattatttatccaataactcctgaagcacgtacaacccgttggacacgtacttggcagaagaataaaaattcatggtcaagttttgtccaagtatttgatggtggaaaccctccacaaccgtctgatatcggtgctttaccatctgataatgctacaatgggtaatcttactattcgtgatttcttacgaattggtaatgttcgcattattcctgacccagtgaataaaactgttaaatttgaatgggttgaataagaggtattatggaaaaatttatggcagagtttggacaaggatatgtccaaacgccatttttatcggaaagcaattcagtaagatataaaataagcatagcgggttcttgcccgctttctacagcaggaccatacgttaaatttcaggataatcctgtaggaagtcaaacatttagcacaggccttcatttaagagtttttgacccttctacaggagcattagttgatagtaagtcatatgctttttctacttcaaatgatactacatctgctgcttttgttagtttcatgaattctttttcaagcaatagacttgttgctatattaactaacggaaaggttaattttcctcctgaagtagtatcttggttaagaacagcaggaacgtctgcttttccatctgactctgtattgtcaagattcgacgtatcatatgctgctttttatacttcttctaaaagagctattgcattagagcatgttaaactgagtaatagaaaaagcacagatgattatcaaactattttagatgttgtatttgacagtttagaagacgtcggagctaccgggtttccaagaagaacgtatgaaagcgttgagcaatttatgtcagcggttggtggaactaataacgaaattgcaagattaccaacttcagctgctataagtaaactatctgactacaatttaattcctggcgatgttctttatcttaaagcacagttatatgctgatgccgatttacttgcgcttggaacaacaaatatatctatccgtttttataacgcatctaatggatatatttcctcgacacaagctgagtttactggacaagctggatcttgggaattaaaagaagattatgtggttgttccagaaaacgctgtcggatttacgatatatgcacagagaactgcgcaagctggtcaaggtggcatgagaaatttaagcttttctgaagtgtcaagaaatggaggtatttcgaaacctgctgaatttggcgtcaatggcattcgtgttaattatatctgtgaatctgcttcacctccggatataatggtacttcctacgcaagcatcgtctaaaactggtaaagtgtttgggcaagaatttagagaagtttaaattgagggagccttcgggttccctttttctttataaatactattaaaataaaggggcatacaatggctgatttaaaagtaggttcaacaactggaggctctgtcatttggcatcaaggaaattttccattgaatccagccggtgacgatgtactctataaatcatttaaaatatattcagaatacaataaaccacaagctgttgataacgatttcgtttctaaagctaatggtggtacttatgcatcaaaggtaacatttaatgctggtgttcaagtaccatatgctgtaaacaatacaaacccgtgcggtatttatccaggtaacggtgataatgctacttttgctgtagcaaatatcgatattgtttcgtggaatggtattggttttaaatcatcacagggttcagcagcccgaactgttgtaattaatgcacgtaatggtgatattagtacaaaaggcgttgtgtcggcagcaggtcaagtaagaagtgatgcggctgctcctatagcagcgaatgaccttactagaaaggactatgttgatggagcaataaatactgttacagcaaatgcgaactctagagtgttacgatctggtgatactatgactggaaacttaaccgcaccaaactttttctcacagaatcctgcatctcaaccttcacatgttccacgatttgaccaaatcgtaattaaggattctgttcaagatttcggctattattaagaggacttatggctactttaaaacaaatacaatttaaaagaagcaaaactgcaggtcaacgtcctgctgcttcagtattagccgaaggtgaattggctataaacttaaaagaccgtactctttttactaaagatgactcgggaaatattattgatttaagcattaccgctggcggtaatattagtggaaatatcactcaaactggcgattatacacagactggaaaatttaatttaattggtccgcaaattgtagcaagcggtggatatattgagtttaattatcgtactactggaagtggggcttggtccggtcaacacactgcaaaagctccaatttttgtagatttaagctcagctacttccacatctgaatataatcctataattaaacagcgctttaaagatggaactttttcattaggtactttagtttctgaaggttcgttgaagattcattatattgatgaaactggtcaatctaaatattggacatttgcgcgctcaggtaattttcaagttgattctggtaatttattagtatctggtgggtatttagtcgctcagagcaatattaaaacaagaacaggttctttgattggtccatctgttataactaaaaatatttcatttgatacgaaagcgtttggacaatacgattcgcagtcattagttcaatatgtttatcctggaactggtgaaacaaacggaattaattaccttcgtaaattccgtgcaaaatctggcggtacgatttatcatgaattagcttctgcacaaaccggaaaaagtgatgaactgtcttggtggaccggtaatacagccgttaataaacaaatgggccttcgcaatgatgggtctttagtgttgcgacgctcactcgcaattggtacaattacaacagatgaaaacattaataattacggctccactggagcaatgggtgaatgctatatagtcattggagatgccgcaactggtgtatcatataaaagatctggtgtatatgatttagttgctaatggtctttctatcgcgtctattactcctgatagtttccgtagtactcgtaaagcgttatttggacgttcagaagaccaaggcggaacctggacaatgcctgaaacgaatgctgcatttttatcagttcaaacacaggctgatgaaaacagtgctggagacggtcagacacatattggctataattcaggcggaaaaatgaaccactatttccgcggcaaaggcaaaactaatattaatactcaagaaggcatggaagttaacccgggtattcttaaaatagtaaccggtgcaaataatgtaatgttttatgctgatggcggtattacatccactaagcagctttcaatatataatggtgtatatttagcagctaataattctactgctgggctaacattcgctccaactactacaattgatggcactaagcaaattttgtgggaaggtggtaagcgcgctggacagaataaaagctatgtaactgttaaagcgtggggtaattcatttaacgcatctggcgatcgtaatcgtgaaacagtttttgaagtagctgacggacaaggttattatttttattcccagcgtgtagccccaagcggctcagaaactactggtcttgttgtaactcagtttgctggagctgttaatgctagaggaagtattattactaacggaagttttaaagttaatggattgagcactttagtcggtaatgttaccatgtctaatggtttgtttgtcaaaggtggttcttctgttactggacaagttaaaatcggcggaactgctgatgcattaagaatttggaatgccgaatatggtgctattttccgtcgctcagaaagtaatctttatattattccgactcctaaagatgctggagaatctggtggtataagtaatcttagaccattgataatagaactgaacactggcacagttaaaatgtcgcatgatgttcatttaggagattctggatctggtacaggattattacaagtaagtaatagtcttaaaactattaaaatgatatgtccagtaactattaatgaacgcaatgcagcgcttactctagattctccttcatcttcttctgctaattatttgcagggttctaaagctggaactagatcgtggtatgttggtcttggtggtgctggaaatgatttatcactttatagccaatcttataggcatggtcttgttataagtgataatttcgtgtcaatcactaaaccctttaaagtcggaaatgcccaactaggaactgacggtaatattaccaacggttcaggaaactttgctaacttaaataccacgttaaatcgtaaagttaattctggatttattacttatggagcaactgctggatggtataagtttgcaacagtaacaatgccacaatccacttcgacagtcttctttaaaatagccggtggttctggatttaatagcggattattcacacaatgtaatattgctgaaattgttttacgtactagcaataaaagacctgctgacttaaatgctgtattatacacaagaacaattggatctgcatttgaagatattgcagttaataacgtctctggagatacatatgacatttatgtttctgccggaacatattgcaatcaattaacttgtgaatggacatgtactgaaaacgctacggttagtgttattggtattaactcatctacacaatcgcctgtagatgctcttccagacacagcagttaacggtcaagttgctaatgttcttaataacttggttgatcgcggtaaagttaaacgttacgaagctgattctgaaatagctattaataaccaaaccggcattcgtattagaagcaacggcgataaaactggttctattgctacaatgctacgaaatgatggcggtagtttttatattctgtttacagataaaaatgccaccgatggcgcagcaactgttaacggcgattggaatagtaagcgtcctttcgcaattaacttaacaaccggtgaagtgctaatgaataacggtatagctgttcgcagcgctgctttattctataatagcataaacgtcaaagataatggttctattaactttgataaatcaggcgctaaccctagaaatatgagaatatttcatgctggcgatgcttctcgcggtaaccgtattgaaattgccgatgaaactaactatattgcttactttgaaaaagctccaggtggagctaaccgctttgtagtaaataatgctactgtggctggtgttaatcaaatgaattcatttggtattaacatcaataacgcacttggtggaaacagtatagcatttggtgataatgacacgggtattaagcaaaacggcgatggattattagacatttatgcgaatggtgtgcaaacgttccgtttccgaaacggtgatttgtactcatataaaaatataaatgccccaaacgtttatattcgttctgatattcgcttaaaatctaatttcaaacctatcgaaaatgcacttgataaagttgaaaaactcaatggtgtcatttatgataaagctgaatacatcggtggagaggcaattgaaactgaagcgggtattgtggctcaaacgttacaagacgttttaccagaagctgtccgtgaaacagaagacagtaagggtaataaaatactcactgtttcttctcaagcccagattgctcttctggttgaagctgtgaaaacactttcttctcgtgtaaaagaacttgaatctaaacttatgtaaaagagggcttcggccctctaaggatttttaatggcaattgtaggtgttcctggctggattggtgaatctgccgtgaatgaaacaggacagcgttggatggatgctgcaatgagagcagtccgtgtttcagttcccggttggatgagctcaatggccggacaatctaaagaagtatattatagcattggtgctagtaattcttataataaagatacattaataaattatcttaaatctcaaggtagtactcctgttgttgttactattactggtaacctagtttcttcatccgcaggacaaccgtgtttagattttcctagttcattaacgaatgcatatgtgactttaattgttaattccggtgtaaccgtatacggtaggggcggtcgaggtgctcaagctggtaatcaggctggtgaagctggcggtactgcaattaataacggtataggtacacgcttacgcatcactaacaatggcgctattgctggcggtggcggtggtggcggcgcgcaatcaaccgataatagctggcatgggaaatatgtttctggcggcggtggtggtcgcccgttcggtgctggtggtagcaacggtgcagcatatccaggtggatcggcttctttaaccgcgccaggtgctggtggtaaacagcgggcaggtattacttggcatggtggtgatggtggtaatgtcggtgaacgaggaaaagatgctgcaagggctaatgggttttctaactcgccaggagctgctggtaaagctgttaccggaaatgccccaacatggactaaggttggtacaatatatggttcaagagtataatttttgaataaatatccttaaaaggagggtctatggcagcacctagaatatcattttcgccctctgatattctgtttggtgttctagatcgcttgttcaaagataacgctactgggaaggttcttgcttcccgggtagctgtcgtaattcttttatttatgatggcgattgtttggtataggggagatagtttctttgagtactataagcaatcaaagtatgaaacatacagtgaaattattgaaaaggaaagaaatgcacgctttgaatctgtcgccctggaacaactccagatagttcatatatcatctgaggcagactttagtgcggtgtattctttccgccctaaaaacttaaactattttgttgatattatagcatacgaaggaagattaccttcaacaataactgaaaaatcacttggaggatatcctgttgataaaactatggatgaatatacagttcatttaaatggacgtcattattattccaactcaaaatttgcttttttaccaactaaaaagcctactcccgaaataaactacatgtacagttgtccatattttaatttggataatatctatgctggaacgataaccatgtactggtatagaaatgatcatataagtaatgaccgccttgaatcaatatgtgctcaggcggccagaatattaggaagggctaaataattatttgttcgtatacatctctagatatcgatatacaccctcaaaaccctcgttgaattcgtcgatgagggttttcttatcttcttgagttaattcagaaacaattttacggaatgaattctgatttaattttctaccttcatgcgttactccaatctcattcagaaatgcaataaaattagcacgattctcaacaatatcttctcgggaaaatttaatcaaaatagacgcaacagtaataatttcacgaactgtatcaatgtttttattcattaactataccactccactcaattagttgactttattataatatcatcagacacttgatttgtaaactgatctgtgttattttcttcaaaaattttttctacgaattctttgaacgactcacgttcctgagctacattatgctcaattaccatttcaagattatgactcattcgaaataatcttcaatttcgtaatcatggacataaatcattatagtttttaatacatcatcgatactttttcctggagctggaattacgtaaaaataccctgcttttgagaggtctttataagttccaatcaagaaatcattattctcaagatgtagttcttcaactaattcattaacaattgaatggtataggtttggtagaaacttatatagtttttctagaatatcaattttgattgtgtattgaaccacagactgagaatcaataatcatagaccttccccttatgtttctgtttgcgattagattctttaaacgctttcttcttatccttatgaacagaagctttattaaaattatgttttgcgactaaattgttcatagtgctgaattacctctcttaaacatttgcatgtgaatgaaaactttttagctacaccacattcaaatatatgttctcttaaatcgcgtgtatcggtatatcccatctcaacaataaagtgccttatcagatttttatctttatcattcagagagttaaaatagtcagattttgaattaatttccctggccaaattgaatcaccttcagttgacgttttagctcttttatcatctcttcgttcatcgcaatataaagatcgcgtaaagcaggttttagcatgtcatttattatagaactaaatggacatacataatcttttcctacaagctttttggtgaattccatatcgcagaacttaaatcccggctcattggtataaattccccaattagttgacatcattttattagcatattccagtgcctggatttgattcataattccatcgatttgaaactttttaatattcattagtaaaggtcctcagagtaaagttctttttcactaccaccgcgttcaatacgtacttgtccggcgtaagttgcaataatcattgcttcttcacgtgtccaataattactatattggtcaataaacccttggtcatcatcacaaacttgctgagtaactaattgaggtttaactacatctaaaacttctgccatatctttagaataatgacgagcacctggaataataagagttcgtccatcttttaatttaaaacggttggctgcgcaaacaattcgtcgttgatatttttgattttcgtcccaatatgcagactgccaacagatttcaggaacttctttcagaatatcttcttctgtgcatttataaccatgcgctttaaatttttcaacaagactttctggagtctcacgagataaaggaacattcaacatttttaaacgattaataaatgggttcatttaaaccatcctttaatacgctgccacaaagttttctgttgagctttgttaacaccaattgagcgaataactggttgagattcctggaattctttataatcagcaaggtaaatttcataagccgcttgaacaaaagtactgatcgctgccataaagttcttgcgaattcccatagaggcttcagaaccgccacggatgattaaatatttaccagtcttaatctttacgatacttccaagataagctccatggtaccagatatcccaaccctcttgagtaggttctgcacaacgacgaagttcattgataatttctaacttgttcattatttattcctcacagttcagatgctacagtgattacagcttcaatgttttctgctgaacgtttaatgtcaagatacacattaccgtttttagcgattttacatgacattccgatatcagtaaatttctgaatatgatgttccatcattttgtatccaaaaattcgcatatttccattattgttaatttcaaaattacgaattccgtgagtgcgtttttctaaaatagcgagatagttactgcgataagtttcaacctttttaagaacaaatccattttcatctaaaagttttaacatgaagtctttatcttcttccatatcagaagtaatctcacgagatttacgagttgctcgttttttcagcagttccggagcattttcctgtgcgtataaagttgctgcgtttgaaataatatcctgagcttcaccagtaatgattaatccatcaccagatttctctaccaggccttttttaatcaataccccaatattactattaactactgcgttacctaaatctggatgcacctcacgaacttctgcagctgtaatgaaatctttcttagcaatagtaattaaaatcgcagcggttttttcattcagaacatcgttagaagctttgatgatgtaagttactttagacattttctaatctccgtaattctgtatcagtagttgatagttgtatagtaccacagtatgctttggttgtaaaccgttttgtgaaaaaatttttgaaataaaaaagggagagcctcggctctccctaaaattactgcatgactgtgataactatcatgataacacgttgaattccgaacgcaagaagacctcctgctacggctggaacaacgcctaaacccgccagtaaaatgctaccagatactaatgcagcgcttgtaatacctatgaatggactcatttgatttcctctaaatctttagtgtattcggtaactacatcagtagttttccaatattcgttttcttctttcttagctttagcttcttcagcaagtttctttgcttcgtcggaagtcatatgaaaaatattcattccaactagtttatcaacataagaagaatacatctcaattttagaaagttcttcggtcagttctttacgagttttaccttgtacaacaatttcacctgaaattactttcttaatgaaatgtgccttggcaaaggctaaacgaaatgttgattcagtttctttgattttgttatcaattcgtttttggacataagttttacgaacttcaacgaagtctttgattaaatcaactacgttatcgtaaacttgcagctttcctttctcattaataacagtaatattctgtgaacgacgctcaatcaacccgaagtctttcataattttcgcgtgacgttcttcttcattatcgctcaaagagtattctttgcggaatttaactttgaagccaaaaccatgctcaccacaagcatcatcccacgtaatgaagcctttatcttcaagcgggtctaagattttactcacgtaagtttcacgatcatacttatacggaatctcagtgatatgcatttgagttcgtgaagtaaacttgtacgttccacgaatttcatattgaccgtcaatttcaacgacttcaccgcgaaattctgggaattctaccttcggtttagttactttctttccttgaagagcttgcaatacagctttcttgacagaagaaacgctatgaggaagaatgtaagttgcataaccagttgcaataccggaaacaccgttaagaagaacagtaggaataataggcaaatagaaagcaggcggaatgtgttctttatcttgatgtaccggagcatattcagtatctttatatacgttatagaaatttttacttacacgagcaaaaatataacgacttgccgctgctttttgaacggtacgagaaccaaagtttccttgaccatctaacagaggaaagttattattccaagtattagccatcaaagcacctgcgtcttgtgcagagttttcaccatgatgatatccaaggtccgctacaccacctgcaatagaagcgagtttgtgaaacttatctttatttcctcgtgccaaatcaagagctcgagcaataacaaatcgttgaactggcttaaatccatcaatcatatttgggatagcacgattttcaaccgtgtacatagcataagccaatgcttcattatcaatgatactttttaaatcgcgattattcagttgcataaatttaccatactagtgaatgtagtgccataataacatcagaaatgaaaagcacgacttgaattaatccgaacattactccataatatagtgctaccaataaagtagcaagggctaatgaatagcccaagattttcttaatcattagtagataacaacacaaatgttaaatatgcacacataccctgggctaaagcttgtgaaaacacactgctagcatcgatacagatagttaaaacacatgctactatccaacaaataaatgaaataactcctaataattttgcgatattcatattttcctcactggcgtccgaagacgcctttgtttttaagattgttacgatagaactgcatcacatgttcgttatggaaattactcatacacaccacacattttgcataaacgttcaaaacagataaatccgccacctacacacatcacgacagccacattatcattaagaggtagacctaaagccgtaaagattccagtcaatgtgaataaggctaaaactaataggtaacccattacaaatagagctttcattagtatgcctgcaaaacaaatttaaagttatcagccaacatacggttcatttcttcaagtgtttgatactcagaatgatgattacgagtaaacgctaaagctaactgaccttttccaaatcctgtcgtcaaaggtttcatcttagaagcaggaagataaaatactgcatatggaacattgttatttgcaatagtacgcgcaagctgagaccgacgttgacgaatatgacttagaactgcgctgaatccttgcttagaacgttgattacctacataaaatcgtgcagacacacatggattactaaatggacgaccatctaatttacttactaaaaagtaaaatccaggtttagataaaatatctttatgtggaactcccaaaaaaccattcaccacccttgattgtaccaataacagtagcacctgcatcattcagatcagtaacagtcatatatttcatattaatttcctctaaattattttctactccaaggccgcatgaatacgcggccgataaattaatcgtcgcagtcgacgctcaattcccaaaactcttctacagtataagtttcagtatcattttcaatacagaaacgttcattactgttatttgctaaagtagcgttaactgtcggtttctcgctagtgctcttaagaggtgaaatacgaattaactgatcaccgttatctaaacaaaaaatttcaccaacttttacatctttaaaacttttcataattcacctcaaggagtataaaatccaaatgcagttgttgaccatcccatccaatatgggaaatttgcaccaatgtaaaacataagaatataaaaccaaccgctcaacaaattcatcattttacaccattccaaattgtttcaactacggattttaaaccattttgatgaatgtccattccgactaccgccatcaaatagattccaactacaactgaacctaaggcaaaaatcagcatgaaaatgaataaagccggaaaaatattatcgaaaaaccattcaataaatgtaaaagcactgcgtttacgcttcatattttcctcacataaatccaaagtaagcgtttaatacatcaatcattaaaacgattgggaatatactcaaaactattagtattataactacattccatatagctttaataatctttttcattttctgttcctccgtagttgatagggtaatagtaccacggaagaacagtcttgtaaacaacttttttaaaaatattcgtaataaatgtgaataccaactactaccgctgaaacctgtgcaacccaccacgcgcaagcaataagtacagaattcaaaattttcataataacctcattacaaaagtaaatgttaaacaaattactggaatactaattaaccaaacaaaacaccaccatagtgaactcatagctcaatctcagcgatttccaggtgtttttgttttattgcctttttaacacaatcatggactaaatatgaccatgaatcattatattctccattaactaatcgttggagatcttcacgtgatgataagtaaggttgatctgattcccattttgataaaaatactgcagtaaaaatatctccttcatctgtagttgaagtcgtaaatgcaataaattcaccgataattttatgtttagcgtaataaaatttaaatttcatttttactcctccgtagctgatagttgtatagtaccacagtccttgtggtatgtaaaccgttttgtgaaaatttttaaatggaaagataccatccattgtagttgctttttcttacaaccttacgaaggtcttctctatcaccgatgaacttcggagtgtactggatgacacctggatgaatttctttagtgttgaatataattatacagtcagcgacttgatgatttagaatgggccctagatttattccagaaccatatggatactctccgctgcatcctgttgttaccgaaatccaacgtgagtcagtttgatgtgtcttaacttctacacgaagcccgcagtatcttggatgcgccaatacatcccatgcatatgtgtacggatcatcgacatcttcttggcctttattgacatatccgcttagccaatctgctacaaaaaactctgcgtacaccgcgatacggcatctttcgataacttctgccttatcctgatttgggttttgttttaaagagtatcttactgtatcagcaattttgaccttcatttcactagtcaagtcactgttcgatagggtaaatgtcggaatctgaaatagtctctgtaaacccggattcgttttctgcatttagactttcctttttactgctgagataagcgttatatactttaagagtgccgtaataaattcggtcattttcatctaaagactcatggtcaagttcatcgagttcctttttatccatgactataatatcattgcagtaaagaaacccaagtttttcgtgaccaaactcaaatttattgcagtacacaatattagcgtgatgatttccgtgcagtttaatctcttttatgtcggaatcaccaatattcatacaataaatcatattttttccttaaaacaaaagggccgaagcccttattttatttgaattgtgcaattcttttttctaaacaatctgcgtaagatttcattgagatgaactgtgaaagcagtaattcttgctcaacttcattaatcgttagaaactttgtgctttctaaaaatttgctcagtgcattaattttgagcattaattgatcgtattcttcttttactcgtgcttgataacctaacataattttccttagttaagggccgaaacccttatttaaattgttcagtaacgtcttcaactacttcgtattggcaagtacgcattttagcatcgttgtaatcaatcggaattgatactacatcacgtggatgtactttaacttttacaactcggctggttgaactgccaaagtgacgaatataagatttagaacatacatgcagaccacgagaacaagtttgtgtatcatcgtcattcacacgagtacgcggcattttaactactttaccaggactgttatcaaaggtgtttgagtgacagtcaaagtagttgtcacgaactactttccaagcatagaagtaaccatcttcggtgatttcaatatcgtttgctaccaagaaatcaaagagtcgagataccgctttttggcttgggttttccaacagattttccaagaacggaaaataaaattcaaagttttcacctttttccatcgaatcgagaatacgatcaactaaaccagaccgtaattcgatattttgatagaacaagcttccgccttcaattcgaacatcgccggaaatatatttttcaacagcgcgacgaacattaattttttgtgccgcttcttccaacttatctgctacaagcagattaagaatttcctggaagtttgaatgagtattaggagttgcgttataagttacaccgtcaacagtaattgaaatgaattttttagatgcattccaaataatgtcagatttagcaactggagcaataactgcatcgctattaactttaattgtaatatcaccgctaatagtaactttagagcgtttagcttcttcagcatttttcaaaacacgacgaattgtgtcaaccgatacaccttgccaatcagccaattcctgttgggtgtaattaccacttgaatacagcttaacaatttcagcttgttcgtttttggtcaggcatttaatattgtacat

SEQ ID NO: 3 - DNA, 166836 bp, Shigella Phage 3
  misc_feature (2)..(2): n is a, c, g, or t
  misc_feature (6)..(6): n is a, c, g, or t
sncstngttaggccgcaagggccttcatagttttagcgatttgggaaacttcatcatcacttaaagagttgcgataaccgatgaagtcggaaacaatacggaatttcttggtaaactcagcaaccattttatcactattttttgaagcattacgtgataattcatcaaagagattagttactgtccagatatcatgaccgatggtatcttttccaccattgaaatacacaccgcgtaatgaactaaccatattaccaagtcgtgtatattcttcagaaacttcatctgtactgaagtacttcatcataaaatctagttcaggatacttgataattttatcaatatatcgttgagctgaacttgaataacctacatacttatcataatctacatcatcaaaagcatctacatataaatcacgcaaagcttcaaaaatacattggcactgaccgagttcttttacctttttctgtaaaagcggacgaataacataaaattcattaatgccaataagattagccatacgaatcaaaatattcatagatggatgacaaagcgatgtagtaccatccatagagaaaatatcagaacgatgcatatacgctacataaccagtaatttcatctgcttctgacgtaagtgtaaatagttcctctttttcccatcgcccatctttaatttcaaatttaaatgctgtagcagctttaggacgaggagctttacttttaactacctttggaatatagcttttaactaaagcttcaatttctgacaaataatgaatgttaacttcatcactttcaaacatcgccataatgtcaggaagcaaatcaatctgtgattctacttccggattaataaacagaagacgctcattgtgatgaatatttaaggtgttattaaattcactatcatctaatgcacgtgctaatccacggacaatattaacacgatttttaatattatcaataacaatattaatttttgtcgtattaataccaaacagacgataacttgatgcaacggctgaagtttcatgactttgcttaatacgcttcagtcgagggtcaagatttacttcatacaccacgcctgcattacataacttactgtcaggttcaaacatgctctgcattttcttatatgacagatttttagtcgtgaatttgactgaattactaatcatataatctcgagcagaataccccatcttcatcaattcacgatatgtatgacgaggagatgtagattctttaaatcgttttacatcttcattaaatgctttctcactgagttctttaactcgttcaataatatttttacgagtgcgatcatccagtgaaagagcctcgcgagatggagcaatatcaagtgaacccattggaaacttaatgtaattcacttcattgcgaatgcttagccagttacggtctctaataacaccatcgataggataaacaataccgccatagatagcatataatccaccgcgatcaggccagtatctttctggatttacgccataataatcatcaaaatccggaaaataatcaatttcgcggtcaagaccattaatgatagccaaatctttgaatggtcgcatgatataagaaacttcataagcaaagtttctaaagtctttttcttcaactggaactacgatttcaataccagttttatcatctggacccatttcttttacgaatgtaggtttaatttgtggaccatcgccatccatgtaagctacataaccacgaatttcacctttatgataagaagtaatactaaatgtatcagtataactaaacggagatttagaacctaacccaaatccgccaatgaaatcgttagattcagccttagatgaactgaagtatgaattatacaaaccaggagaattatcatcaccctgaatatcaaaatcactcatacccggaccaaaatctcgacaaacaaatcgtggatctaatcgtcctggaacttgaatgataaatttttcaggatttccattaagtgcatgagcatcaatcatgttagtaatcaattcacggactactgcgcgaatcttgtttgtatacaaatcagatgatagaattttaaatactttaggatttgctgcgatgctaaatgcttttgatttagaaccattaccaagaattgtttctttttcagtggtgataatcataatttcctcattaattcatattacgtttaataacttcagcaacttctagtagttcatctttagttgcggtgtcggattgaattttatctctaatatccttaaagcggtttttaaattcttcggcttctcccatatcgaaaaagcgttgaatgattctatattctcgatgaactgctttatcaaaaagttctaaatttactttatatgatttcattccaatatcctcatttgcccaattaattataccacatccttgtggtaaagtaaactactggctcatccattctttacgaaggtcagcgttatctcccatgagcatttcaaaaagctctttccagttatcaggaagtttaacaacatcatatactggattttgaatcatctcacgatattcagatttttccaaagagccaagtcccttaatataacggatgctatgtttaggtagagcatctttagcactctcatattcagcgactgtataaaaccattcttgttttttaccgacctgagcgatgattacaggagttttgacaaagcgaattcgtccttgctcaaacagttctggccaattactaaaaaatccaagaagagaaggataaatgcttcctagaccatcatggtcagcatcagtcataatagcaatattatgataattcaagttttcagctttttcaccaagaactaatccagtgattgcgcaaatatcaaataattctttgtttttaagcatatctgcataagacataccccaactgttgagaactttaccacgcaatggataaccaccgtgaagttctttatcacgaacatcaataagatatccgatagcagaatcaccctcagtcaagaaaagagtagtatcagcatctttaccgcaaagattcgctttgatatgtttatgaaccttagctttagaagcctttttagctgctttagtttctgctgctttttctgctgccaatttacgagctaatgctgcttcaataattggcattagaattgcttcattatttagaatagcgcgtgaaatctttttagcatcaagttgaatatgactacggatttcaccaaatggagaagtaagtcgttctttagtttgagaatcaaatcgcatgtttttcatatcacgaacaaacataacgatagtcaaacattctttaacgcgtgctttagttacatcaattttgaacttacgtttgatttgtggaataaggtcttcacaaatatcatccataacacagtcaatgtgatggccaccattcttagtatgaatgttattgacgtatgttaattgacgaaaaccatccggtgaacgaccaaccgcaatagaacaattttcttgttcttgaacgatagcatgttcatcatattggcgtgcgtatttcttaaaattaccctgaacctttttaccattaaaggtaaattgaatatcaggataaacaacagcaagtgtttggagacgatctagtgtaatgtcaagataaacttgggacagctcattagtttcaaatgacataaaatctggaatgaaagtaacacgagttcctttccattttccaggaatagtttcccaggatttattttccatgccatttgaacaacgaactacaatattattttgaccatcgccagtttcaccgacaaacatcacagaaaaaatgttagttaaactagaaccaacaccattcataccaccggtgacacgttctttatcatcaccaaagttaccacccgcttttggaatagtccaagcagcaactggaccaggaatttcttcaccggtaggtgttttaaccatcgcttgtggaataccacgaccgttatcttcaactgttacttgattgtttttaatagtaacattaattttatttgcgaatttaaacttagtacgaataccttcatcgactgagttatcgataatttcatcaataagcttaacaagaccaggtacatactgaacactttcccatttaccaaacagaaagcgctcatgcatttcattagcagaagagccaatgtacatgccactacgctttttgatatgttcaatatcgctcagaattttaatttcattcttaatcatcacttatcctcgtttggtttcgggaatattatactccggtaatcataaagctaaaggcccgaaggccttttatttaaaacgaatagttgaatccttaaagaacagcccagaacatactgttccttctactttctgcccggtaggtccaatagcacgaaatccagtatgttggaaatcattttcagaacaaccaaaccaattatatccagtgatttcaatattagtaaaaccacttgaagataaaactttggttgcattatcagcatcagtacatcctgctaaagacactgctaatactaatgccgcgatagaacgattaatatatttcataattttcacttaaatttaatggcttgaagaagactaataattctcaagcgacttctttcatctttaactgtaaaagaaagagggtcaccagatttcatagtaatagtacattcaaaatcaaaatcttcggaaacttctttgaagaagtcaaattcttcatcataaattagaacattactctgacaactatgaagaatttttccatcatttccagatgctgtactaatcattgtaacattatgacctttcatatcttcaatgataaattcactagtcaatattacagcattaatagaactattcctattactagcagaaagtagatatttctgttcttcaccttcacgaatgcaatatttcttaccgattttaaacataattaccctttaagtaagtcgtaaaaaccaccattcacatgcttaggagcagaaggccgacgagtagacaaacgatgacatttagggcaaacatcattttctcgttcagaaatctttttaattttttcatattcatgcccgcaatcttcggattggcatttataatcatacattggcataattattccttaaagtgagctttcaacatctgatacaaggaccatgcctgttcattattttcaatagtaactttcatgactgggaattctgtgaaatcttctatttgttcttgctctttctcttcctgctcttgctcttcaactgcctgatatggattttccacttcatcaaagaacccagcttcgttagtagaaagccaaatgaagttttcgtcaaggatatcaccatgtgttgcatatccaactgtgccagtagatgtcacaattttagtaggacgaccaagatggtcaacatctaaaattttaaaaggatgcatacctaaacggcgtgcatagattccgttatcagtatgatctttaataaaattttcttgagcttgtttatttttaaattgataccatttattaacttcaaatctaatagccattaataaatttccttccagtaagttgtaccgtcttcagtgatttcacggaatacaccataaatcggttgtttatcaccaaccttttcatacacataaaccgaagtcaagtgagtaaacttgatggtgtgttccttttgaactactaccaaatctggatcgaataatacatcttcaaattcgtcattagtgcaattctgaacaattttacgtttcattacaatttcctcattaattgaacagtggagcgatgcgtttcagaagagtagcagcacctttagcgaattttacatcatgaaaaacagtttcttcttccgttacaacacgagctttaatgttttcacaatcccaatttttgcgaacaatcttcaaaagctgcagtaaatctttacattcagcaatatcaataacacatccacgagaatcttccattatcgcacgataaccataagccataccgtaatcgttgaaagattgctcgatgataattaaattttccattttattctccaagttgttttctgtatcagtagttgatattgatatagtaccataatcaactactgatgtatatagttttatgaaaaaattttaaactttatgcaaatttatgctaaagctgcttcgcaccattttttaatttggaattcaggaactaccatgaactggcctgcaaaaacaatattgtagagcttgacaccatcttctacccaacggtccgaaataaaaccagcgacttgattcgttgtccatggagttccatctgttgctgccgcaattgtgaatttatggtcttttacaactaaaactgaagaacaaagtttccatttaaatgcgctttcttctggctcaatgaactgacttgagacataaccaatgttaccatcagcgtcacgaactttaacttctttaacacgaccagtaccattagtacgaagtcctaccacttcaactagacgacctgcagctttagaacgagatgcagatgatacacgcttaatttcaccaatattaataatcatagttatctctcacttgttaaaaagattttatactccacgggaccattatactctggtcccaagagtttgtaaactagcttacacgaacattaatcactgcgctgcgaggaactacagagtactctccagcatgaactacgttcagaagttcaacaccatcttcaatccactgatcagtcacccatccacccacaggattcgcgaatggacgacgaatataaactgccttacacagtagatcagttggatcttcaggtttttcaatttctgtcaatagactaaaatctttttcataaataataagcggtgataccattccataatagtttctaatttcaatatacatcataccgataagaattccgctattaacactaataacagtaaaaggatatccgccagttaaaccaagaagttcacaaaacttattatgagatgtattagacagtaccggaaaattcttaatttcatcaaattttttcaattgataaacagcattatttttaatcataattttctctttaatctaaggtaataaagccttttaattcggcatgcgatttgcggaacattacttgatgtccgccaatgataacttgatcatctggcacttcataaatcgcaatgtacattccacgttcttttaagtcttcacgctcttctcgagtgaaccatctcatcatatcatattcactagcgaaagcaaaatgatataatgcaataaaccacaatggaatataattttcaattcgtgaataatctttattccatttagttttaataacatcattagcattttcaactaataacttatcatcgtgtggaataggaatactttcatggctttcataattatcgctatgatgatgaaatgatgatgaattaataccgcaaaattttagccaagttcgagttttcatagaatcaaatccacgataaggagttgattgaacgcataactcttgcctaattttgactataccactatcatcatttaatgcgctaaacgatgattcaacacgataaattttcattttattatcctcagtagctatggtgttataataccacaactaaccgaggaagtaaacaactttttatcgttttgttggaagagacagaggatcgcaatcttcctctgacggagcatcttcaagacccatagcgtatcgcaaagcatacttcatcatcaggatgtctttcgcacagtcatgaatagaatcatgtgcaacgaatccatctaaagttccctttggaagaggacacgtggtcatatcacgaacaagcagaagtgcttcaattctggtacgaatatcacgctgattccagaatttacatggttctaacttaaatgtatcaagctcattctcggaaacgccattaagacgttgaatatcgcgaatgagatcgactaaaattggaaaatcaaacgacattccacggcaccagccttgagatttccaaggatcgatattatgtgcattgatgtaatcgttgaattttgcaataccatcaatggtgcttacatcttcatcggatggtgcaatattttttcgagcttcaggagactgatttttccaccattcgatagtgcttttagtaaaaagacgatgtcctttttgactttttaagtcaaatttaattttaatgccacgtgaaactagttcatcgaatgtttcaacaacttccgggttagggtcaaaagcaattacagccaaatcaataacagctgctttttcaccgcttcccattgtttcaaaatctataataaaatcaaacattaaattttcctcgctaaatcacgaatttgacctacagtataatcctgaatataaactttattaataggttcatcaataaattttgccatagattcaatatctttttgcatctcttcaagactgtatattatctttaaagctttttcgcgaatagtaatattttcaggaccagaatttttctcaatgacagctttaacatttgtcataagagatttaaactgacaccaacttaattcaatcattaataaccgccttataaagatggctaatttcacctaaaatgtaatcactgattgtaacagtttttacttcaccacaaaagaattctaacgcaatcaaatctcgttcaatttcttccaattgaagcattaacttgcctgattcagttttcacatttttgcgatttttgctataagctatttcataaatttcgcttactttatcttgaagaagataaaactgatctttagttatttccacgaatagcttcctcaaatttaatcatacataaaatatatcataacgaccacgggtaacaccaacataaagaagctgctgagctagttcagcatctgcataatgaatacaaggcgtataaatgaaagcacggtctacagacataccctgagctttatggaatgttgatgcaggaagtgctttcactttactaaactgtgatttagcatcccaaaaatcactccacggagcctttccgcctttattccaatttttataagtttctgccgttttacctaaaaacaggttaaacttatacaattcttcatcagatgaaattattttaatcttttcacgataatattcatcatcgccgtaagtttctactgttaaatcccaatgacgaattaagtattctcctggaacaccacgagctttaacaaacgttgatgtatactctgcttctataatacgaactaattgtccgttattaaaaataatttctgacacaggctttccatcaattttatatgttttaattaatggttcctgcattacaataatttcaccgacaataaaatctttatcagtttcaaaaatctttttacgaataatgctatttaacttgtcaacagatttattcgtaaatgccattacgcgattttcaaacaaatcatctagtgatttgacgattgaaaaataatttaccataaaatcgcgtaaagcggtatcaccagtaaatccacgtactccatgcccgtcaacaactttatcataaatccacttaccgttgcgaacatcagtagctacatcaataataggagcattactgcgtttaacttcagtgagttcacactgataaaaatctttatgtgtaaagaatggactgatataagcagtgttttctcctgggtcaacaggtctaatttgcttattatcacctattccaattatagtacaccacggcgggatagttgaaagcagaattttaaatagctttctatcatacattgacacttcatcgcagattaatactctgcatttagctaaatctggtacttccttctgctcaaagaggacattttcttcatatgttaccgggttaattttgagaatactgtgaatagtactcgcttctttccctgatagttttgaaagaatctttttagctgcatgagtaggagctgctaaaataatgccagtttcgcccgtagatattaaggcttcaatgatgaacttagtaagagtagtcttaccagtaccagcaggtccattaatagttacatgatgtttcttttctttaatagccctcataacaatgttaaaggcatttttctggccttcagtcaaatcatcaaatgtcatcgtaaattccctgcaattggtatactaacaatacgcccagtatctaaaattcgccgatataatctttgtgtgtctacatcaggcttaacatgtttaacttctattttattaaaccaaaacttgcgtggagtctcaactaatcttggaattcctttacctaaagctaatcgatactgctctttaagagtagtaaatactttatcagcaatattccattcaaaaaatacagcaggacgatgttcatcaagcggaactggcgccgtaaatccgtctttgtctcggtaaactatcgcatatacataaaccatattatcctcggataagtttaaaaattgaacaattcagcggatatcctcttttcagtttaagtttatcaataaaagacaagttttgataccgctctacaccttgaataattttatcacacatatcatattgcatttctgcttctgacaactttttcacagttttccaatccgagcctttaagaagaacgttcagtttaacaacttcagcgccttctgctatgcgagaaccatcaatacgagctttaagtgctataatcgttagcttaacgtcagaagtttgttttgatttagaaagctgagaaatgtgttcaattcgattttcacgttttttctgtatagctttaatttgattataagtctttttgattttagcccatttcttttcatctaaatttagtttatgaacttttttcgcagatgaacgaccaattcgcaaagcaaataaatcacgcttttcaatcaactcttctaaagtataatcagaacgaaatgtattatactttttctttactgcaataacattccctttaatgtatccaacgttattatcaaaacgttctaatgataatttctctccttcaatacgattatcaaaaggttctcccgagtaagcgcaaactttctgatctaaaatgttcttaatgtaattgaagtctaagttaaaatctttagaacgtctttttgcagatgcctgagtatgctctaaacgacgtttaattttacgaatttgattattagacatattatgcagtttcatatttttctcacatcttacggacgattgactactatactataacatttttactttaacttgtaaacaactttatgtaaaaatgctttaaaaatttcatggtataatgaatctaagtccttccattatagattaaatccttcaaaatcaagagtatagatagtgtatgttgaatactttttgtactcatatctatctgcaattctaaatacacttccagctggtatcattacttcttgttcatctgaaactaattccatattacgataacgatggctatccggaaacttaaagtttggattgtattctttacagcgtagagcttttatagcatactcctggaaattgaataccataggagctttgaattcaaaaataacttgtgtgttatactctaaaccggaagcaaaatgtagagctatatttttatcatatgaagctgatactactttatcaaatgtaataatatcaattccttgatttaacacttgcttagtctcagctggaacacctctccaaagaggtttatcgtttggaaccaaacgagatttgattatttcatttaaccaagtatggtcatctggcttattagtaatacaatgaattaaaagttcaatttcagataaattaaacccttcagaaagtaattcttcacgaatagaagcacgcaccgatgcatccattgattttattttaaaatcttttagttgcattactgagtatttcattcaactacctcaatatcataaactttaaatgttccaaacgaatcgtgtaatttttcttttgaaatagaagttattctatactttccaattggaatcatccattcttgttcacgcacaatcatcattaagttatcagttctttctgaatctaacccatcagtatcttcatacgtgtacttaaactcagtattaggagaagaaagtataatatcgctgatatggtcagaataattaaaagctttatcagtttttaaacgaagtattgtttcagtgaaatattcagcataagaaaaagaacacgctgtgtgtaaactagtagtaaatgaatctaccctgttcgttgaaaacacttctccaacctgtaaatctttaataagttcttttgtcgattttgatataccacgatataattgataaggcgatttagttaaatgctttttaatgattttattcaactgcctatgaatagcttcattctttttggcttccatacattgccaaagaacagactgctcaaagtcagtaaatttttcacagacttttttatacatatcatattgaaaatcaacgctttcagcttttatagataactgttcaacatctgcaggattaataatcatgatagcctccgtatacttcagaagctatcatatcatcgttagaaaggaaagtaaacaactttttgaattattttgcccagggagcccaaggcggagggtcaagatggtatgaagctagttcttctagaagagcatctggggcttcaattccataattctgtaatactatacggtactctttcttataatcactagaatcattctggatattcgtagaatgattatcttctaacatctcaaataaatccatattaattcctagcgataaaaaccaaattgacgattagcttcaataatctttctttcttcttcggacattctccagcgtagtccaacatcaaaatgagcccagaccatcctaacaaatgcatttatatctttaatatcttcaataatgaatgttttacttttagaaggttgactcgctaatttaactttatcgtcttcaaacatgtcaaaaagaccatattcatgagctcttttatagcctttaatagttaaagcttcagaagaagaaaatggtgaatctgtattctgcaaaatatcttcagtatgctttataattagaataacattttctggatattttctttcttttatatctttaattaaaatatccggattttctgctaaaggaataattaacgagcattttttatcaagtgtatttactgatttaccttctttagacataaatcctattgaatacagttttgctacttcaatcatgtgatttcctcttgcctactaatggaccatcaggaattttgttttcctggatatatttctcattttcttccatcattttactaccaattttaagaagcaaatccattgcttcatttgcttttgctttggcctcttctaacgtcatatctttgctcatgatttatcaccgtaaatatctctcattaatttaagagctgagcgctctaatttcttttctttctcagcactaatcattgatttcatccattcttccgattcgttctgcatttctttatttgcctgttcaacccaaccatcatcaatatacattgagtttggtctattgaaccattcaagcattttcttcagaactttcatttgttttacctaaaacaatagtaggagcatcgtcaaattcatgaatttttagcaattttggatttaaattattccatacataataaataaagtatgataaagcatcttcactcgcaattataaatttatttccttcatttattttccagtcatatactgaatcgtacgaataaaaagataaaggattaccattatattgttctgcgctaacattaatgtattcggatttagtaaatgcttcaattgctctaaacggactatttggcacagtttcaataattccgatctttttaagttttatttcaacatcttctggaactggcattgaaacgaaattttctacgagatacatagggttacaataacccttatcaatcactacggctacagtaattggaacatctttagcaaacgacatgctattactgctaatatacatttcaaacaaaatcgcttccataattttcctcaatcacaagatgtagatgaacaactagaatcacaagaacttccacatgaatcacctgcccatacatgaacaggaacattggtgtcatatgaatcagaactagactgtgtattctgtgcattagatgatgtagtaggtactgaccagcgccaaggatttttataatattcttgggcttcttcataagtcatagtaactgcttctactgttccatctcccatataaacatattcaactacagttaaaggaagatagtcatttgaaataggaactacaccttctcccggagttgtagagaaaaaatctgtaaagaaatttttaaaccaattaaagataaacattacaaaaagcctctttgaaattcgactctttgaaatccaccccagtcagtatatcgcatttcagcattgaactcgactgaaccatctgcatgcatcatgaatgaatgcgtgacgacatcacaatcccagcttttcataccccatttatcagagatagctttatcaagaaccttctgaaggtcttcatttggtttaatccaacgatttaacatagtgttctcctctataagatattttttattataccacactcattttgacatgtaaaccataaaatgaaaaaaggaatcccgaaggattccttaaattatttaaccacctacacctggtgtaggtgtaacagtccaaagaccttcattagcagtgatccattcagtacgctgattttcttcatatactgtagaatatgctgctttttcagaagggaatgtctgataatgagcaccagaaattttgtgaacatcagaataaagagggaaagctacagaaatttctttaccctgaattgtaccaccatcaactgcttggtcaaatgttttgatattaacataaccgcgagtactagccatgtaattctccttttatttaaattacatgattatttataataaattctcgcggaacgttaaaatacccaattttagttaatataacaacatcaccattaataattaccggagaataatcttctggagcattaaatttccagtgggctctaatattatatccatcagaaccaaatgctcgcgtagctggtctcccagctttttgccatgcgtagaaatcaaatttcattttgaatgctctataattaattttaaagcttcttcactgacaaaaatttcgtcaggaccttctataacttcaaccatacgaagttgattagttaagagctcacatacgagctccttgttataatctttaaatagctggtcaatacgtttcttatgggctttcttgagctgacgcttatttaaacgagccattaataacctcggtcttgacgagcgaagttttcagcatttttcaggtaataaagtttaaagatttcttcagctgacattccaagagcaataaatttattcatgaaaaagtgaaattggtcaatcagttcaaatttaatttcaagctgatcttcaggagataaatcttgaattttcttggattgcatttcagaataacgtttcttccaaggtttccatacagcagaagcttctttttcaccattactcataccaccaagagaagtatatagctcgcgagtttcatctgcgatataatcgtcttggtttcgcaaccaagcaagaacttctcctgcagtttcaagtgaatcaggatgacgatttgtttctggtttatcattagccaaacgaatctgtaaatgccgctgcatgtcaagcataacctgcagtgggtcaatattgtgcataatattctcagcatatgcacgatttgctttatcaacaccttcgatcaaatgagcgcattcattaaagtaagccattatttttcctttcaattcatgggttagtagattaattatacaataaatatataaagcaataaggaggacatatggtacaaaaattaatggcacttgttaatgccataaaaggtaataaaaaacgtatagcttttactatttctgctatggtaggaattttactctggaactttattttatcaccaattgcaattgcgcatggtgttaatattccagtagttactcttgatacattcgtagatctagcatttgctttagttgggttaatttaaatcttggcatatttagatagccgcattttagccatcaacccctgggcaatattatttttcatatatttcataatttgttcaggggttgcaccttcctttctaatcatatcattgacatcttttgatttccagggagatttatcccaaaacataaccctttctcctgcatcaactaatttagtcattcgtttgatagtgtcagggtgacgaggttcattatctaaaacccacacacgtctatctttaaatggaacaacttctaggtctaattgaccacccgtaatagctataccattttcaataaaaagtgaatctataggtccttctagaacatatacatcaccatctttaactcgttcaacaccgtaaatttttgttgcctcaggataagctttaatggtgatatatttttgaggagcatctttctttaatgcacgtccttgaaaagactcagcttttccattagcattataaattggaataacaagacgaggctcagaaatttcctttttgtatgttcccggtgctatgctattaactaatttaggccattcggttgtaaaccaaagatatttccatttatcctttggaatacaacgagcttttacatattttataattggatggtcttccgccagtttatctaatctaacacatgacggaagagatttaattattttcttttcgggttgtttaggaagttctttaggtttttctactggacgacttttacctttttcttttcttatttcaaagatatactcacgatataaatcaggttcaaactcctttaaatatattccgattggtgcatgatagttacagttataacaatgaatatttccttcattactatcaccatagtaccatccacgggctttattttggtcggtttttgaatctccacaaactggacatctaaaccgcaatttaaaagttgaactattatttacttgtgtgaatttaggtaaatgagctaatgcacgatacgcaaactcattatcaatccaaggtattgatgacatttttactcttctttttctttatattcctcttttttcytttttaggaatctgttcaggacctttatttactacagcgcctgatgttgttccagtagagatattttcaggactaccacctgaatctccagcgaccatatcttctttgataaattctttatatgttttcatattaacctctattcataaaagcattaaaaatttggtcatcaatcgatggaatagcaactttttctgcatcatttagcaaatcattaatttcatcagatagcataacacacgtacctttatttcctgtaattgttactgcacaattacgaacgttttctttatcaaattttaggttaatattttcatagtgaaaatcctttaatgccgaatatatctttaaaatgaaattgtcttttactacaataaacccaacctcactattaaaacgcggttcatggaaactgtaataaaccttttcatctataaaatcgtatgaaattttttccatttttaaatatgaaaattcagaactatacatattaacctttattcataaaagcattaaaaatttgatcgtcaatagaaacttttactttaggctgttcttcaaacggtaattcatatccacatattacaattttgtgatcgataccaaaatacacagaagcaatattattaatattattttcagtgaaatctaaatcaacatcaatatctttttgactaacgctcaaaggataattaatacgaataattcgattatctttaacaaagattccaccgacatactctgtgctgcgtttaaagtttacacgtttcctaaatgaaaaatattcaggttctttatgtgctcgactcatagggcttaaagtgtattccgaatatgaaatatcaaatcctacaccttcaatatgagccaaagtgtcatgattaaaccaattataatcgtatgccaaatccattaaattgtaatatgtgaaaggcaccggattaacatcatatgttgtacctttaaaatctgcccaggcaacgatttcgttatctttaacaattacaaaaattgtgccaataagatatccacggttattttcatcaggcgttatattataacattgtgcatcaggaaatttaccgtatttaaacggtggatttttgtgcatataataaatcatattattcacctgtgatttcggttacgatatttttgttattaaagtttttatcgcaatacagaacataattatactgcattacaccaccagatttaagctgtttttgcacttcagctttcatttcaggacgatcacgttcaacgatattcataatatccgcttcaatttgaatttcaacttcagtctgatctgcagtcatagaccattcgcacaaatctttgtcataacccgccatagcaggctgagcagcacaagaagccaaagtaaaaattgtagcaaaaataaattttttcatgataatctcctcagtagtttatgtttatatattatctcaatttccaacaaaagtaaacagctattttaaaacttctgcgtaatcacatgttacaaactgtttctctagcttaacgattttacgaaaataccttttatactgacgaatctgcctcttcgtaggacgtacagcaaacttaataaattccactcgaccaaatggaggactttcttctgctggaatatctaacaccaattcccacgtatctgcaataagtgctttgaattgagtatttttcctgacgttatacggagtaggtttaaataaaacaatatgcatattatcctcggcaatccacttcgcacactttcttgtcatcaatgaaagcttcaactaatgctttattaacttcagcatattgagtagtagcccattgaacgtcatctttcatcattgtgatttctttagtaaacatactttcgttcttaaaccaccccataaaaactacttttaccaattccataacaatctcctcatttaaccaacaagactactataccatagtcttgtcagcttgtaaactaaaattttaattcattcgccaaagcatctaactgagctcgagtggattcatttctttgatagcgattctgctcagcctgaatctgttgtgaacctgctacttcactcacttcagttggagtagaatcttgttcaatttctacccatttttggtttcctttttgaacacccatcaaaaacttattccacttattcttatcaccatatcgtgatttgatttgcttaatgagttgctgttcagcagctgctagctcctcggtttcaatgaccgcaagcataaaatcagctgttgctggaagaccagcagattctgcgatatcactcatgttaacatcagaagagtcccaagcttgtttaccgacctgtgctgcagtccaaagaacagtttcggtttcaacagcaagagcacgcaattcctctgcaatagctttaacagttgtgtaactattttctgaataaactctaatgcggcaagatttacaaatacctagatagtcgacaataatgattgttggaacaaaattctttttgagcttcaattcattcaagagagacctgaatgtgttagcatctgccccaccagtagggtactgtttaacaattaaacgaccgagagtagatttctcacgccatttttccatttttcctttatactcagcgtaagaaatatgcccatcatcaatgtcatcaagagaaacatcaagcatgttagcgtcaatacgcttagcacagacttcttctgccatttccatggaaatgtaaagaacattatgtccgagctgcaaataatctgctgccaatgaacacaaacctaatgacttaccgacgttaacaccagccattaaaacgttcagtgttccagtttcagctccgcctttcgtaattttgtttagaattctgagtttaaatggaactttacgagctttattcatataagatagccagcgtgcttcgtagtcatccatccaatcatgaccaacgtagctatcaaatgaaattgataatgcttgacgcatgatgtcaggaatagcaccaacatccggcattttcttatttcgtttttccggaggaagctcagcattagtttgaatttcgattattttagacgtagcattaaacatcgccctttgctgaacatatttttctgtttcttttactaaccagctgtggtcttctggagaatcggctagttttgaaataagtgtttttacaccagaatattccgtttcagtaaatgaactattttctaatgcaacatttaacgcattaatagatggaacgctatgatactcattaacatgagatttaattaatttgaatgtatttttagctggaccactttcaaaatattctgaatccatatatggccaaacttttgaaaaataagcttgatcaaatatgagatgagaaagaataatttctaccacacttactccttaaaagaatttaaattttttctttgaccttttattaaatgcatcttgcagttgcattgtaatacatttttctacatgaggagctaactcagcttttctttcttggtcaagaacagcaaagtccattacgacttttccatcaacccaatctaattttgtcacatacacaatgtgtgtagaaccatcttctagtttaatgacaatctcctggataacattttccatggcagatttaattatcttaagagattcattaaaaagacgttcttttctttcttcttccccctccgaagagggggattcatcgataatttctagatctaagtctaaatcatctttattcattaaattcttccatatcacttaactgttcgaggtcagtttctaaatcagctgctgatttacttttactttctggggatttaaatttttcaacctttgagttaatcaattcatcaacttcagcttcaacaatttcattactatcaatagcacctaactgataagcacgtttaatagcatctcggaatggttgatgcttaaataaaggaccccagaatgtagtgcagttggtatcttttgcacgccaagatttttcttcgcgaatcatctcgccggtttcttcatcaagaaattcacgagcataccaaccatttttaggttttaccacgaatcctaattctagagccatatctaacaatccagaataaggatcgataccaccgtcaaatttaacatcaataaagaatttacttttttctttaacggtacgagatttttctacatttagaacaaattgatacccctgaagatcagaaccatctttaatctgacgcttaccgataatgaatacagtatcagccgaatacattacgcctgtaccacctgtcatcacggttttactaaacatttcaattgtttcaattgtatggttaaccgcaacacatggaatatttttaatgctaaagtaaggagtaacaatacggaataatgacttcagtgatttagcacgagtcatatctgccacagatttttcattcaaggcatcttccgtttctttcttagaagccatattaccgattgagtcgatgaatacaataactttttcaccgcgctcaatagcttcaagctgattcaccatatcaattttcagctgttcaactgactggattggcgtatgaattactcgttccgggtcaactcccatggatcgcaaataagctggagtaataccaaattcgctatcatagaatagacaaaccgcgtcaggatatttgttcaaatacgccgcaaccatagtcaaagacatatttgatttaaagtgtttagaaggccctgcgaaaatagttaaaccagactgcataccaccatcaatcgcaccagaaatagcaatattaagcattggaatttttgtacgaattacatccttttcattaaagaatttagatgtagtcagttcagcagtcattttagaagtggaagctttaatcaaacgggattttaaatctgcaatagacattcattttttccataggcatcattatattttcctcactggttaaagatagagtaattataacacaataaatttaggcattaatcaactgctattggatgaatagcattaaacttatgaaatgcttctgatttttctttacgtgaaacgcacatgcgaagaacctttaatggttcgtcttcttcacccaacgattttcgtttttcaatattagaagttttccaacgagcttgctctggaaactctctattgatttgctcaagcgctctattatgtttagaattactacgaattgaactgcacccgccaggagcttgtgcttttccagatacaaccagatatttgaacaaggccaaatgcggataaccttgattaattaaattgagaaatgcatacatatcttcgcacaaatcaatttttccatacccaatttgttctgtcgtaagttttccaaggtcataccatgtattcgtgaatccatatgaattttcacgataattaccccaagatgaagtaattttaaaaattggtaggcgagcatgaccatgataatacccgcaatccatggcatcttcaacgtattgaatcaattcatagaactgttcacgggttaattgattgactttatctacacaacgacggtcatctctttttcgcattgaactcatacgaatagtagtatcatcgtcaatcatccagattcgttggcctgcatacatatcagtaattgctttacgagtaccggcaattccgtttacatcatcaggaatagttataattttagctctagacccataggcatcataataagctttttcttcatgttcacgcactacaatatggggttcataatcagtcggaaacatatcaagggcagaaactgccccgacacgctgataacttggaattacgaattgaatcatttccactcacctttatagtctttttttcacaatatgagtttcgccagtattccaccaatgatcaaccaagtaaaaatgacgagaatatacatgaagacttccaacattccatataatagaacctgctttatactgacgagttgaatcgcctgcattcaaatcagatactaatttatctaatacgtatttttgccatgcataatcattacggaatccgaagaccacgtcatttgagcgcatgcttactactgcattgactttcttatcacgaatcaggtactgtactgtattagtacacatgaaatctgacatgccatctttattgtagtcaaattgcatggatggacgagtataaatcatgataccacgtcgagaatcaggattttgaccaagttcagctaaacacatatcatactgggcatagttatcttctgaccaaatagcccaaccataattcgagttaatttcgcctttagaagatgctacctgctgccaaatctttggtgtttcacctggaatatctttaacaaacagactttgagacttgtaccattcaagttcacgctgaatgtattcatcattaagagcgccaaaaataaagggttcatctgctacaaatgatgcgccaataatttcaatagttttaacgccagttttatcaactacgaaatctttttcttttaatgcaagccccaaatgaagacggatttcttcaactgtcatagagtcactaatcatttaaacctcaattgatacattcatatttaacttgtaacagtaataaaccccaacctaaaataatagttggaatcataagaggaaccgttacactatagtatatacttattataatcatcaagattaaaagcaacactgctataattttgcttttcattccttctctctgatgataattacctgatttggttgtgcagactttttagtttcacccgcaattgaccaaataaatgtaataaaccaaccaataattgaccagttaaacagtaaagatgtgaaaaagattcctactgtcgattttgacccacgcatcaaagcaataaaccatggaagcatgtatataataatagccaacacacctgaaactaaaaccataaaaattgaacctgctactaaagtttccatattttcctcacttagtcaaattttttacgcatgaattataagaattcactacatactccatcggagcatttttaccagtacgccattggtaattattagcccaattagcccaaagctcggcgcagtagttttcaatttttttcttcgcgtgtaattacatctgaattacgatatgcttgagcagattcatctggacgaatagcttcgtcaaaattcgcctgcatctgttcgactgtttgctttggagcttctttataacacttgacattaggattataaaatttgcttgaacagtttacaatttttcctacatcagactgatttactaccggtccttgagctacacaaccagtaagacctaatgcaataaccaaaatagcgattttcataataatttcctcaaatgcaagtagtaattactccagtagtgcttatgcaggtattacccatttgcacacctaaagatccatttgtattcacatgaagattatcatcaattttaactgatattttaccattagtgtgaataacggtgctagattcaatcacaggttgagtatcattttcaacactaacaaatggaactgctgctaatgcaactaaacaaactgctaagcatcccataacaattttcattttattctccaaatccgtattagttgatagttgtatagtaccatggaagaacagtcttgtaaacagttttgtgaaaattttttagggaattctaaaggtccagaatcatctgtttttcataagtatagatttatattacttgtatgaaaaagggacccggaggtccctagatttattctatcagccaaacaggaagtctaacgaagctttttcctcatagtccatacctgccgattcacacatacccgcaagtggtttaacaaacgatttttggaacaaagttgagtagtcaatccaagacagtacgtcagaacgaatttcttttggaagttctgtgcccgacggccaagcaatgcacttatcaccaaacggatttccttcacgtaatggaagaaccattactttatttccatccaaaattggagctacacctaaaccgttaacagctcgacgataagttagcacaccacgaatatggaacggacatttaaatcctggccaacctttatcatcatatttcgctatatcgttcgcagtttttacttcagcaataactttatagtcaagttgacgatattctttctcgaagttcttgtaatattcttggacagactcttcaccttcctgaagaatacgacgaatactttcttcgagagcttcttgaaccgctttaggtgttgaactctgctgagtttccatacccatgatttttagatgtggttcagcaaaacgcttatcttccatatcataaacgttcagagcataacgctttttcgctttccaaaatccaccaacaccctttgaaccaagtggagggcaagaaatagcttcacggtccatatgcatcagatgctcgcggttattcatataatcacataactcacgatatgcaacatcaatcataggttccatctttttcttaccaaactgattcatgaattcaactaaatcattttgttctttaaagcggtcaagacctactttttcaattactttatctacacaaacatataccgaatcagtatcacccgcggcgatgaaatcttcaccatcagttccacatactttatttagatattcattaattttacgagcaatccactgaataccaacttgaccgaaaattgtgatagcagtagcatttcgcaaatcatagtaacggaaatgaatattaccaagagcaccataaagactgttaataagaattttacggttcagctgatttgtgttagcaagtgtagctgctttttcacattcttcgatcagactattaagaacagattcagtgtaattcgataattcgtttaagaaatcatcactgaacttaacatatcgttcaacttcaggtttagttgaacaagaccctgcgcctttcataataatctttttaatagcttcggcattcatttcttcagcgaacattttctttttccaatctttacgctggaaaaatactttagcgatttcctttggaatgataccttcttgatgcttatcgtacatccatccattcggagaacaagaatattcatcactcggtttaggagctgttcctgcgatatattcatgaattggatgaactttaaactgaccacgaatagtctcaggactaatgttaacctgacgaataatgctcggatacagagacgtcaagtcaaaactcataatatatcgacgagcaattggtttaggttcaaatacgaatgcacccggaaaactctgtttaacgtgcgaaccttgttgaggaataaccttatgttcacctttcaatgagttaaaaataatagcatcccaggttttaataggactcattacaccggaaaaaggcattttagcgtaataagacatacttaaaactagatcgataaacccgcgaattttatcaattgcttgaactgattctacgtcaatgatgttataactaatgtatcgttgatgattagtctcacgaagtttattaataggaccgtcgtatggtaatttaccttttttggtttcatgctgagcaactgattccaaagagaatgacggcaaattagtaaaagcaaatttcttgtacaaatctaaataatcaagaatagatacaccatcaatagaataaatttctttgctgccgtacatattttgaattagtttagattttactcgaccgattggagagaagcgtttcatactacgttcaccgagaaccattttaacgcgattcatgatatacggaacgtcaaacccctcaatattccaaccagtaaaaatagcaggtcgtttctgttcccagagattgatatattccatgagcatatcacgctcattatcgaatggcatataaattactcggtcaagaatttcttgaggaacttcatcaccaccttcacagtcaagcttagcagctaactttgcatcccattttgatactgaaccatacattgaattcaaaaggtcgaaaacataaaaacgatcatcaattgaatcgtaatgagtgatagcatcaatttcatattcagctttcattgggtcaggaaatttatcaccagtaacctcaatgtcacagttagctacacgaacaaattttcggtcataaacaatttctgaaccgtatgtatcactgatataagcgagtttaaaatcgttcataccgagagcttcgagaccgatgtcttccattcgtttcatccaatctcgagcatctttcattgatggaaatttttgaggagcgcagtttttaccatagatgtctttgtactttgactcttccttacaatgcctaaacatagttggaagatattctacttcacgagtacgttcctttccattttcatcaatataacgttcaacaatattatttccgactgtttcaatagagatataaaattctttcatagatattccttagtttatagcccgagttattaggctcttgatatattatactccaaataaggggccgaagcccctttgctttaaatttctattgtacgacgcgatataacggacttgccatctgtatttgtggttttgataatcgcatgaaatgcgcgctggcgtgggtaaactaatcgttggaattctttttggaattctatttgtttatcttccgggaggtcaaaaaccagttgggtagaagacagaccatatgtttgttttagattttcgaatattagaaaagcttcggtaaactgaatctctgattgcgtcatataatttgccttaattaccaatcgtatatttaggaacgagtttccattcgtgtttttgtttaaaagaaataactcggaagttattggttaaatctttcataaaagttctttgaccaggaacgatttcaatcagtccccaatcttctaacagccatgcaatcgaatcacgacgaacttcatcttcttctgtcatttcaacctgacggccatccatacgaagcatttctttaaaatgaacgatatagtatagtccttttttctggagaatgtggcaggactgatacagaactttatctttattattagcaattcccatacgagtcaaagtttcttttactttcagaaaatcttcaggttttttaagagtaatttcaatcattttaccattccaatgctagttttttgagttgtttctgttcttttacattcttagtcacttcttttaaaaaatcatccgtgactaaaccttttagttcttttaatactaaaggaagttttccatttttagtaagaattgatttatagttaattgcatcatttgtattaacttgataccgcttagcaagtaacttaataatcaatacttcggtagaatcttctaccagttttgcccatttaccatatcttttaccccgaggaacagcagccatcaggtaattaaaatgggcttcatcgcttaaacctgatccaattaaattcatagcatatacagctggcatgcattcaggaaattgtgataatgcattctcaaccatgtattttgaataatctttttgagcaatagagcatttagttttattattaatagctccaattatttcaaaaaattcattttcagctttttccttgaaagaatcggcagcagattggacagctgtccaatcttttgaataccaagcaacttgatgctcgtttaattgaatatcatcttcaaataagctcatatcacttccactgcatttcgcatgccaattgaatgaaaagatatgctaaatgtaattccgtattagccgcaattccatgatactggttattttcaccaacaatttcatacatacgaataatactttgcggagttacgcgtgtatagatttcttcggcaagtttacctacgaaccacgaataatcagctgcatattttggcgctaaagctctgagctgtttaacatctttatttttgagagattcaagaacatcatcaatagcaccacgatcgttagtaaccagtgataaaataccagcatccaaaacacctttagatgaataactatcgagctcgccaatagttttacgaaaatcaggaaaattctttttaaccaaagctgctacaactttcatatcagctatagcaattccttcgtgcttacagatttcagtcaatcgacgaatcatctgcttcatcatttcaattttatcttcatcagtcggttgaccgaatgtaataactcggcagcgtgactgaagtggtttaataataccatcaatattgttagcagtaataataatactacagtttgaactataagcttccataaaggaacgaagatgtcgctgagactctgctagcctgagcggtcaaattcatcaataacaattactttttgacgaccatcaaatgaagctgcactagcaaaattagtcaaaggaccgcgaacgaaatcaattttacaatctgacccattcacaaacatcatatcagcatttacatcatgacacaatgctttcgctacggttgttttacctgttcctggagaaggagaatgaagaataatatgtggaattttacctttacttgtaatagatttaaaggtttctttatcaaaggcgggaagaatacattcatcgatagtagatggacgatatttctgttcaagaatgtgttctttttcatttacagtaatcataatttcctcattcaagttttagtgtaaatttaagggccgaagccctttattaaaaatcgtgggtagaatcagcttcaagagctactacataattcgcgtgttcaccttcaaatttagcagcaccctgtttaccttttgcccaaagcagaagtttgtaatttcctggttgcattttcatatttgccatattgataatgaaattaaatgtattttcaccatcataatcaccaagagtcaaagaatatttaacgcgggtcaaagcagaatcttctactttattaaaaccgttaattacgattttaccttcttttactgtgatagcaattgtatcaatctgcagaccacgagatacacgcaacagttgttgaaggtcttcagctttaatttcagtaacaacagatgctaccgggaatggaattggtttattaggagcaactactgtactcggatcggctgctggccaaaaaattgttgaacgggcatcagcaattttaatatttccatcttctgactgggaaatttctgcatcgtcattaactagagacagaataccgagaaaaccgttcaaatcgtaaatcgctacatcaaaatcaatagtgtcagaaatatttgcttctgcataagttgtaccattaaccgcgcgagtcataataaattgaccggatttaagcataataccagagttaatagtagcgaaatttttgagcagagcagtagtatctttagacagtttcatgtaatttccttcaattcaaatgagatttaattttataactaatttaataaagcaattaacgattaaaatcagccgcaattgtttccgcaacaatttgagcagcaacaattagacgttcatctgcattaccacaataatcatcttcaaggcgttcaccacatgaagtcataataaatttagcaccggcgtttagggattctgtagtatgtttgcgcattagttcaatccatttattacttacttcacgatcgatagcttcataatacgcatgacgagcaggtgcagatttaattttgttctgaataacttccattgcgttatcagaaagagacaaaacccatgctcgacgaattttattttggttttgtggatttgattcagaacgcacgtgttttggctgaatatcttttacgtcaacagtataattcacagtaattttagtcataatacacctttagtcataataatcagtaacagtccaagcttcatttctattggacattatttttgtatattctgctttaaatgcattcctaagcatagattcagtaactatatgctcttcattagaaaaattatttctcagaatatatcgttttatttcaggaaaagttaataaatgctgtccagttgaatattccatgtttttcctccatagagattatactctaataaattaaagcataatctcttataaattaaaccattacagtaaatcgaccaactttcttcatttgaagatgctgaccatattcttgtgggtcatggtctttatgcgaaattataaaaacattagtatttttcattgaatttataatattcgctacacctttaataccttcggcatcaaatgacccatcaaacacttcatcgagtattaatgtactaatactaacaccagatacaatagaagcaatatcacgccaagtaaataaaagagcaatatcaattcttgccttttcaccttcactaaatgaagcataactaaaatcttcacgaccacgggatttaattgtctcattaaattcttcatctaatgtaaacacataatccgcttccattattttaagatagtggttaatctgcttattaaataatggaatgtactttttaataatagcacctttaataccagaatctttgagcatatcagtcaaaattcctcggtggtatttttccattactaaattagtttttgtcttaacaattttatcaagttcttcttgaagcagtgctatttcatcagcatggtcaataaactcagaagatgctttttctatagctgctttaacttttttagctttatctactgtcgtgattagagattgctttttattgcgaatatcatttgccaacgactgctgggttttaatattatctcggtattcatcaacaagaacttttaaattatcacggtgtgttgaaagctgttcaaacgaatgcgtgcattcagaaactttatctttaattttagaaacaactttatcaccggaactcaattgtgacaaacaggttggacataatccaccttcgtgatacatattaatgactttattatacgagtcaatttttgatttaattaaaactgcttcttgaccgattttattaaatgcatcagtcgggtcttcgtctaaaacaatattaactaatctttcattagcttcttctatttccgattttagcgttctagcttcttttgccaaatcatcatacatattttgcagacgagtaagattgtcacccgttaattttttctggcgttcaacgttatcattatatattttaatttgttggataatactatcttttttaacatcaagcacttggttttgtgaatttaattcacgtattagtgctttattaagcttatccatttcagctaatgttcctacctcaagcaggtcttccacaagctttcttcgtgcaggggtcgacaaacccatgaaaggggtataccctgctgtaccaaggacaacaatctgcttgaaactggcatatgacattccgataagctgttcaaattctgcttggaaatctttactgctggcagattcattaagacgtgtaccgttaacggtgatttcgaaaacgtttggtttttgtcctcttttgatatagtactttttctcatcatattccatccacagttcaactaaaagttctttcttatttgtgctgtttattaattgacctttctttacatcacgaaatggtttgccaaaaagcccaaatgtgatggcttctaacatagtagacttaccaccgccatttcggccagtaataagagttttttgaaccttatctaattgaatgtcaactccattttgaccaactgacattatatttttatattttactctattaagtttaaatgatttcattttgtatccaattgttcacaatgaagaaaattctttaactaaagcctgtaatgaagcctctattggatatccattcttaactaacattttcctaaacattacatgtttaggacgattatatgatatccacaattcatacaatttgtctttattatcccaatgatatccttttcgtcgagatgctatatgagcttttctaatctccggatttttccaactagcagctactgaatttgatatagctattttatattcaggttttgataaagcagcacgaacagccttttggtgtttaattttattttcttcgttattaaaccattcccttgaagccattgaaatttttttgttttgttttaaaattatttaatctttctttattatctttcctattttttgctactgaaaaatattttaatgccctttctctagcagcatttctattttgcggatttgaataatactgttgaagcctttttgatattgtgtcacttacatcttgttttataaaactatattcagcagctattaaatcaacttcggctaaagataaatttttatatgtttttcctgacatcattctatttaaagcatttagcatttttccatttttaccttttgctaataagaagtgtgctttaaaatgattaaaatgacttaaattaactaaattccatgtagattttaaatattcaggaaatattgatttaggaagcacgtggtgtgcttccgttttacctggagttttaacagttgaattcacagaaataaaattaatgtaagacttggcgtcttcttcactcaacgctaatttttcaactaattcctttattaaaaattcatcattaatgtcaagtttaaaattcttcacaaaagattccttttaatgtatcttttagaccattctatcatatcatcataatctaaaaagtattcatcaaattcagccatgcaaacaacgccttgtgctgcttttgatgtaatataaattattccaacatatctggaatcttcttcagtataatcaatatttgctatgaattcatcattaatgtcaaatgtcgaaaacttcacagtatgcatccttaatacaagatacagccatatctcgtaatgatttaggtgtgtcattatctaaaatgttgaagttaaaagatacagcccagtcagtgcagactgtaacctttttaatacaattatcttcaacctctaacggttcaaaccaatattcaataatttctttatgcccaatatcatcttttacttcgcattcaaaatgctgactcatcataacatttttaaattcatcaaaagtcattgtgttgcctctacatatagctggtttgcatattgaataagtgcttcgcggtcagaatcagtgatgtctggaattgcattaatgtattcttccatcaacgtctgaagagattgaacttcaacttcttcactatcatctgactcgacagagttatcaatctttgacacaactcgtaatgaatgcacaactttttctagttcagattcgaacttcgttagatttttgtctacttcagttactataacacgcactgatagatttgtaaaatctttatagtcaatttttcccttaaatggatactgaattcgacgatgccaggtagtgttgtttggaataaattccattcgttctgtttctgtatcaaacatccagaacccacgagggtcattctcgtcacctgcagttagtgtccatggtgtcccaatatatctgacgttagcagcctcagagatagtatggaagtgaccagaccacacttctttataagtcttaaggaaatcaggttcaagaccatgagatttcattcctttataaaaataaaatccgttcagttcccagtgaccaacgcaaaaagaagcagatgaagttttgatgtgttcaagaatttcaccagtattttcttcacacatccaaggaattaaatcaattaaacatccgtcaaaatctactgtagtaggcttatcatacactttaacattaggatatttagccaaaagctcagtagaggcatttggagttaaagtatttttaaagtgcatatcatggtttcctacaacagtatgtagggtaataccagcatcatcaagcatttgaactatttcacgagcaaactccatagttttatgcgtgattgcttttcgcacatcaaaaatatcgccgtattgaatccaggtagtaattccatttttcttagaatattctattgcttgtttaattccatccaactgaatggattgaacccactcatcatcggctttaacacctaaatgccaatcacctaaatttaaaattttcatatatcaagaaccgtcattgaaatgcaaaataaaattattgaaataaacccatctggtgtgctaaagaacccaatccaacatgctctagtgaatagataaaatgcgagaaaaagtatcacatatccaagaaatatcattatatcaaactccgtataaagctaaagggccgaagccctttattttgtaataatgtcaaactgttctttaaagcagaagcttgaatcttgatgttgatacaaaaattcatacgctttttctcgctcacggtcataaagagctcggtcagatgacagttctttaatacgctcgaatgttgattccatatcattttcatcaaaccaaatgataccgctatcatgcgaggtcaaaggagtattatcaacacggaattttaaattttcgccagtagatttccaaaataccggaattgttccacatgcaccaagctcaagatgagtatattctaaagagcgctgtagatattttttatccaacttactcaactgataaccaaaaccggatttactcatacgttcaagcatttcgctatttacataacggtcaagaatttgcgttggcaaattaggagcaattttaatttggtctacttgatgaagacgataatactcgtatggaattcctttttctttaataggaatgaacgctggagaacgttccagaccttccataatagtacttagtcctgcaggtttaagatgtttttcgtgaaaatcaaacatctgataaaaacctttccatgtagtcgtacgaccaatccaacggttgatattcatgttaatttcagaaacatctttccagtaggttgaccgaaccttcgcaatatccataggaggctgaaagttatatactgtcggtgcttcttcaatatcatcaaacagagaaactgtttcaggataccattctttcatcagaactttattaaaatcaccattatcagaatggctaaaaataacatcagctcgacgaacagtttcttctaatcccaaatttcggcgcaaagaaagagaagaatggtcatgttgataaactacaacacgaacagaaggtttaatgttatcaataatttttttatagttattaatagtgtcttcttcaaccgaagtagcaggaactgaattgataattagaatatcacaatcatttaccagcttaagtgttttatcatattcttttgccaataaaaccggaattgaaaatgatttataatcatgcgcgcaattacgagtaaatgatttatctttagcataaaccaaagttacttcatgaccatttttaataaaccaatcacgttgctcgagtgagaattttgttacaccacaaccttcaagacctcgagccataaaaatacatactttcatttaatatcctctttgttttggtttattttaccaaaaatttataaagcaatataggagccgaagctcctatccacataatacgccatacagaggctcattagaacttttaaattttatgcgcttatattttatagttccttctgctttagctttatcatgagactctttaaagagtctcatcatttcctctttagaggaacgaattttattataatctatttcagaagtctgggtgttcatctttcataactgccaccattttttgacttgataagaatcaacccacactttcatattagggtctgctcttacaataggaggattaacttctttaattgaactatcatggtattctttttcagaaattttcacacaaagatgaccattcaaagattcagtaaatcctgcattaattttaagacgcttgaattttacgtgtgtaagcatcaatcatatcctcaatttgcgatctagtagtcttccaaagaatactgatgagttcatcgttatatggctgttttagaatatcccgacttttcttgatagcatattcgtattgagcaaaattattgttttcagctgcaatctgagcgtgcttataaagacgattcagttcgcgtttgtttttagacaataacttatttgcttttctttctgcttcaagacggttcttttcttcaatagaagaaataagcttttccacttcatcattaatttcgggtttatcagtcatattatttctctaatataaaataaaaatcatcatctgttaaatgatacctgtaatttaattctacaccattagatttaaaagcggtatcatacggattttctggatcaatatcaatgtcaagagctaaaacttccctgagatacattttaagtaaatagggaatagcttcaacttcaggtatttcttccaagaatccggagaggttaatcgttagcctcatataaaaaatccaaactaggagaatcgtctacaacacttttcttttcagcccccggtgttctataggttgattcttcgtaatgcgtcattttatcgtagatgtcttgaataaaagtttcatctactaacgcaaccatatcgtcgtcacgactgtcatagacattgtgaacgaagtaactgtatttctttgcaacttccttacgttcttttttaatacgttggacgaatgcattaaaacaagcttgagttatatacgcatgtgggtttttatatttcgtttcatcaaaattgtgaagccccttaatagaagcttctataccatctgcaatcatttcttgtttccaagactgggtgtatcctgaaaagttgaaacgtttagataagccttctgcaataagcataatggctaatccgatagtatcattctgacgaactactttatttgggtctttattatttgctaattctgttttccaatcaataatagcttgtaaaagctctttattgtttacgtaattatatttaggcttagtttctgacattttcacctcttagctcaattcatagatctattatatcataatatttgaagatctatcttaaagcatagaggatatcagttatctaagtaaacagtatgcttggaatactttttccatcatctttttaaattcatgaatatctatataatgactagttagatcagcatgatataaaaagtctaaaaacttttcatgtgtactaacatattcactttcatttaattcagaaacatggctttcccaatatccaacaccagtcttatttgggaaaaatgaaattttcatgtattggtcaacatagaaaattccataattttcaatagtaatagaaatattaataaatttcatacattcatcaacttagccgcttcgagagctgcatctagtgaatcaaactggtcaacgtattcaatcaattcgccataattagcgtataaccaccattggctaaattcatactcaaggatgaatccgtttccttcaatttgagttaaaccaatgccatttgtatttacttcatacccagcaagacgtaaatcgttaataagagcttcgttcataattataccttagtaattttcaggtctgcaaattttttcttgcgttgatttttcatgcgacgaatagttttatcggaaatttcatgcttttgataagctttagattctacaccaaaagctttaacatcaaattctgacaagatatattgaaccaacaattcacggacagtatttcgtccaatcttctgatcattctgtttcatcgtctgatgaagctctttttcccatttatccaaaatttgaggagttacaatatcgcctttttctagcagagaaactactttatcatatgcgtaagaattaatgacgtttttaatttgaatagtcatacattatcctcaattacgttaaaattttattatccaaaaagggccgaagcccttagctaaactttttggcacccttccagccttcatacatcattgcggctgatattaatattgctcctgagcaacttgaatatttgtgattccaaaaccagtttagaaaaacttcatcatcaataccttgtgctatcatattttcaaagaactgacgacgagcttcggcaattcgttgcgataatttagattcaggattcatttaaatttcccaattaccattttcatcaatgaatttaatccagtcatttactgaccacttagttgtatcgccttttggagtaacatttaaagtgtataacccctgcttaaaaagcattcgtttgatattcatattttcctcagctgtaacgatagcactcgtttgatttacgtttagcaactcgttgagaagtattataatcaaaatcatcgtcaatgtaaactgattttttcaactttcttacttcaccacgtaattgacgatttaactcatctttaacttctgaatcaatgcctttcattctacgccatttatctgagcgaaaaatgttttcaaccatatctttatgacttacaccatcaggagctttacgctttccgaaatagtcataatcacgtacttttaaatctttacgacgatacgttttacccatggagtttaatttccttagcaactgaactaaatacagcacgatcgcaaatcatctgtttattccatttaagtacagtataatgaacatctagatcatctactgctgtaacaataacaatatgtccgttaacacgataatactgatcctttttaatctctttatcaaccatatcaaatcctcaaaggcaattcatatgttaataataccacagtttgaacttgttgtaaacaactttgtgaaaaatatttcagggaatgataagaaaggaacgatagcttagaatggtaatatacagaatgtaagaaagaaaggcccagagggcccgtcttagtcttctatgatatctctatcatatccaagtgaaatgagagtttctttgaagtgtttaatgttcttttgtctagaatcattgatgaaaatgactggataacgaatgttaagagatgtgaatccagcgcgtttagcaagagatacaatcagtggacgatcatactcaatcttaccattatttgtaagaactttatagaaagtaaaaggagcattgagctcctttagaagttttgtaactgattgacatccaggacaacgacctacttcatctggaattccatagacttcaatcttgttttgtttcacaactattccctactaagagcagcattcagcttattagtaattttatccagacgctcattgaactcactagaagataagcccttttctggagaaattaaactaatcacgaaaaatacaacaataaaaggaataagaaaaatagctccaactgccataaacagaaagaacgttacagttgtaagaaaatcagctaaacctttacgaaatttatacatattttacccttaattgattaaccaagcattgataagcactaaactatattgcgaataaaattctggaccaaaatgaaaaatcatatcatttatagtgtccataatataattcaatttaatcatgtttccacaccccatcggtatttgaccaaagtcgctgattatctgatcctcgccacagctttttggtcggaagatttttctcatacttcccatcaataataacatcaacatatttaagcatttctagttgtttaatatcttcaaatttatatcctgtccacaaccaaatgcttttattgggataaagatttttaatagtttgaaccacagagtgaatcacgtctctgttatcaggataaagagggtcacctccggttatagttaatccttctatataatcattattcaaacattcaatcaattgttctagtgtttcaccagtgaatggaataccatttctagcattccatgttgatttattataacacccttcgcatttatgcaaacaacctgtaacgaaaagaacgaccctgcatccagggccattcacaaaatcgcaaggataaaatctatcataattcattggtgtttaaccctatgcatgatttctttatttttaccgagattaaatccgcgttcgttcggatttcccaaataaccacatgttcttcttattgtgttcatctttttaggatcagtttctccacaaatagaacaaacaaatccgttttcagtaggagtcatttcatgggtacttccacatgtaaaacatttatctactggcatattaacaccaaaataatctaaatgttgtgcagcataatcccatacggcctcaaggcctttcaagttatttttcatatcaggaagttcaacataagaaatgtgaccacctgtcgcaatgaaatgatatggcgcttcacgagaaatcttttcaaacggagtaatattttcttctactgaaacgtggaaactgttagtgtaccagcctttatcggtaacatcttttacacttccatatttttctgtatcaagtttacagaagcgataacaaaggttttcagcaggagtagaatacaaactaaaagcaaacccagttctttcagtccattgtttaagacgagcattcattttagttaaaatttctcgtccaatatcacgaccgacaagaatattcaattcgtgaataccaatgtatcctagagacactgaacttctaccatttttaaataactcaattatatcgtcatcaggtttaagacgaaccccgaatgcaccttcttggtaaagaataggagcaacagtcgctttaactccttttaaggaactaattctacacatcaatgcttcaaaacataaatccattcgttcattgaacaattcaacaaatttctgttcattgaattgtgttccaatataagaatctaacgcgatacgaggaagattcagtgttataacaccgagattattacgtccatcaagaatttcattaccagtcgaatctttccatacgctcaagaaactacggcaacccattggagaaacaggaatagatgagccggtgatagctttattgttcttagctgaaataatatcaggatacattcttttgcttgcgcactctagagcaagctgtttaatatcatagttcggatcgtctttataaagattaacaccttcttcaacaaacataacaagcttagggaaaataggagttatcccatcacgaccaagacctttaatacgatttttcagaattgctttctgaatcattcgttcagtccagtcagttcctgtaccaaatgtaattgttacaaaaggtgtttgtccgtttgaactaaagagagtatttacttcatattcataagcttggaatgcatcgtatacatctttttctgttttagattgagcataattcaacgcatcagcgatttgccatttttctgcatcctcaatatgttttgcataggtgcgtttaacataaggagaaagtactttatctacattagcaaaagtcgttccgccgtattgatgggaagcaacctgtgcagtaatttgtgccataattgcagtagcaacaccgattgatttaggagtttcaatctgtgcattaccaagcttaaatccattctcaagcattccttttaaatctactaaacaacaattagtaaatggaagagcaggggaataatcaatatcgtggaaatgaataattccgctttcatgcgctttcataataaaagacgggaccatatttttggcaatgtgtttagacacaataccagccataaggtcccgttgagttggaaaaacacgagaatctttattggcattctcgtttaaaaggtctttattagttttatgaatcaatccttcaatttctttttcaattgtcattttaaactctttctaagctgcttcttaaatgaagctattaattgtgttttagtgtcagattcattatattcaaatcctctttgaagcatctcagccatcatttcctcttttcctaaacgagaaaattcctttgatttatctccaacgaagttagggtgaatattattttgggtgtaatcggattttaaataagtaagtaaattttctaaccattcaagataatcaacaccttgtccctttaagccagaacgattaaatttatgcttcatttgaccttctgcggcattgcagagattacaaagcaatccacgtacctttcctgcttttggtccatttaattcatggtcatggtcgaggtgattagcttgaacgtcaggatttagttctcgttggcaaattaagcatttaccattttgtgcatcataaaatttctgtttttcttctttatataatttgccagtcaataacataataaaacccttaccttaaatagataagggtatttattattttcaagtattaaaatgctcggtcagaaaaagaaatttgagtttcaagccattcaatatattctgccgcagcttgcattaaatttccttcgtaatcatcaatatcttttttcaacgccgatttagataatgcatatgaaatgcgttcaccttgaaaaccggctttaggcttctgaacaacttgattagttcgctctacaacttcttcaatttcgccattttcgactgattcagtattccacaagcaccaatacgtaattggcttatcatagatgttaataatctttccatcagaaagttcaatttcaataattccagtatcaggttctatatcatcttcacattcttttgcaagttcacgaactttaaagacagtacctgcactaagttccggccagtaattacacagccctgtatcagcacgattaattctaaaccacttatctactgtaatcatgtcccatctccatatcaattaagtcatttatcgttggttcattatatactgtttcttcatcagtgtaaaccggttcttccggatctggctctacagtttcccatctagccgcccaccaaggttttatagcgtaatccattctcgtactatctgagttactacacgttcccggggctcgactagttcaacagtcggaactgcataataccagtcagaatggtaagaacccgaacggcattcatttacggaaacatgtacgttatgttttggactaaaataaacacactgacgatattgacatttaccatcttgcacccagtcttctatttcgacaggtttaagataatcggaaaaatcgaaatcatagttttccgaaaatgcatcatggtcttcaatgatttcgctcagaactgcatcaacatctaatttattttcaatagtcatttttcaccaattaatttcgcaatttattaagttcttcataatcaatccaggattctaatcctgatggcaaatcagattcaatttcccaaagaagttcttcaattttatgaagacgatctagttcttcagcaggaatagtaaccattgacggagctcttgctacattaatatcgtaaatcatatttaccccagtttgaccatacaatcgccgtatttccacttagaaatagacttttcaccgttagaataataaacttcaagtttagcacgattatttttaatttgaataacctttgctgtcatcaaagttccatacccataataaactgcaacttcatcacctacatataccgcgcttccgcggtaatcgtgaatatagtcagttccttcgagcatcatttaaaatattctcgcagttggtcaaatccaccaatatgacttccatcaggagcaaatacctggggcattgtcaagccgatttgagtatcacgacctagtttagtcagaagctcagcaattttctcatcatcaaaaacacctttttccggcataatgttgataaattcaaatggctgtttcttcacagtcaagagacgttttgcattatcgcaatacacacatttatggatgttgctatcataaccatatactttaaacatattattccttaattcctagtacttgtttaaaagtctcgtcgtaatcaagactttggcccgtttgttctttatgtttgtatataatatcacttacttctgatagcatatttttatatgaacgagttaaagcagatttaagcacgctgtatctatcaggaaatttaccatgttcattataataagctattgctaattcacggactgccttttcagcagcctccatatattctttacgcttggtcattttcttctcggtcaaatcggtgtttacaatggcgacatttataacgaagattactagtctgccaatggaccaattgcacctgttcagtaccgcattcagggcaattaggaacgtttttagaagctctttcacgtcgttcaaccatagccataatagcgtcccaggccggcggtttaaaatctaaatcgtcgcagccgtgaatctttccacgcatttccatatcatcttcctcaccagccataataattttaattaaactggaattacttgaagctgcaatgtcttctaataaacgctttttcatttcaatacctcaatagcattacgtaaaccatttgcttttgcattaagagcttttaacaatttggtgtgttctgcaatttgggcttcaacttcaatcaaacgggcattgagatattcacgttcttcactcagattatcaaccttttctactttaggctcttttacaactgtcttatatgtattagggttcttcagtttaattagaatgcgtgaactgtataacattgaaccattatcttcggtttcgtcatacatttccactacgtccataatttttaacatcatgcggagtttataagacaacgaacgaatagttttgttgtgcttattaatttctttagctgtcatggtgccaagattacgtgagtaataataaggaacctggatattaattaatactgatgaaccacctggcttgtgtgttacttcatcagcaataacccagtccttaacatgaactgtatttgtacggtcatcgcccgcggtaaatagtttgcgagcatgcttaaaaagcatattcacttggtcattgaattgacaagcaaatttatcagcaaatttagtttcaggaatggtagaaaaccaatcagccaaatgagtctttttaacatcattaacaatagtaaattcaacaaaatcggttatagatgtctcagatttaatgaagctcggcttcataaagtttttaatgttctcatgagctacagtagaagataacatacgagaacgtttaaaccattcaagcaaattgcctaacgaatgagaataagcgttttgagtatctttacagatatgattttcctgaccaacatattgaaggaaatcacgaagaatattattgattactgctctgtgcccgatctgataattacggtgtttagtaataagactgtcaaaataatcaatataatgtttacgagttttcatgttcttctcacttggttaatggtttatactccgagccatccttggctttaaattacttaattaactgtaaagcctgttctaaacgatcaagacgattaacagattcttcccaaatccttttagcctgctcatattctttctgcgctttattagaaatttctagaacttctttataagctttttctaatgcaataacttctggacgaatttctaccggttcaggtgaatcatcaagattattcattagttcctcaagggtagtttcttctttaggagtattcacaatttcctcacatttttgttgataaatttctttatcagtaggtgaataagcacatttcacttcacgaagactaattacaattttatatccttcccatccgcatatattcttaaaaggatatgtatgaatattttctactgtttccatacaaagtaatgcagtctctaactgacgagttatagtgctagcaattgagaaaaatttattaatattcttttggttagcgtttggtgtaaaaaatccataattcacaaaaatagctactttattttcatcaagctcatattcttttacgataatcatatcagaagccaaaggatgaatttgacgataatcgccataacataatttagaagctgattttagaatttgtcctttgaaaagtctgaaattactaatccaacgacgagtaaaaatattctcagggtcttctttattattaagatgataagaattaacatcaccgaaccaattatatcctactacatctttggttcgtttaatttctttcccaaaattaccaagaatatcccgattaaccaaatatgaaagaagacgagactctttaaaagttttcttgataacatctttatctacacggctagaaattttacgaatttcatgaataaatttagtagaagaaacaatacttgtatcaacactattgagccattgattgataatagaaagaacgattattttgaccaaacatcggtatagctttatcatcaataacgctattgaatgatttgatatattcgttacgagtcataaatctttggttcgtttaatttctttcccaaaattaccaagaatatcccgattaaccaaatatgaaagaagacgagactctttaaaagttttcttgataacatctttatctacacggctagaaattttacgaatttcatgaataaatttagtagaagaaacaatacttgtatcaacactattgagccattgattgataatagaaagaacgatattttgaccaaacatcggtatagctttatcatcaataacgctattgaatgatttgatatattcgttacgagtcataataatctcctcagtagaaagtaagaacattataccacatccttgtggcaaagtaaactagttcagtgcatttagtgcattgttcagtttagaacgttgttttgtcagattttgaaccctcgattgagcttgttctaacgccttttcagcttctaacacttcattagttgctttaacgagttcatcatctactgccttgatagacttctcaatcgcatccgcgtgccatttttcaacaggtttaagactcggattttcaacaggaagaaaattcactttattgaatttccatgcatcattattacctgaactatacatccaaaatttaggatcgtttgatgagtaattagtttggggttcaggttttttctcttgtgtaacttcgtcctttctcaaaaaatcatatttaaatgaaacgatcatatcaagttcatatgttgtcgtatctaatttaaatcgttcgaaatgctgcgaaatcttagattgaacagcagcaacaacatccatatacttaaatgcttctgtcagctgtgatttaagacattcacaaattgaaagagaatttttagtactaggtttaaagctaattcgtgcagttctattattttcttttaatggtcttacttccatctgaagagtataaccatcaaatttcagattctttaagttaatatcagagccctttaatcgactagcagtagacaaaatttgctttaattgtttacgaaatagagcaataaatctccattcaatacgataatgatttggattaaaaaatcctgttgataaatcaaccttactctgaccaacgccttgaacaaatagaggatttttataatcaatagttttacagaaatcggtgagctgctcacgagcagtcatttgtgtaatatatcccgctttactaaaatgacgtaaccattcactgctattcatatacttaaagtgaatatcacgattaactttatcagggtctaaattattttggcacaaaaatgtcataacattacgggtatagctggcattacgaaccatatcttcaatttgagaacgagttttcatagtgttccttaagatttaagtaaatcaacaattttaattaatttttcacgctcagatttagctttactactcaatccagatagtctgaaaatttcatcgtcatactgttgaatagaaatattcagctcttcaatttgcttattaaaataatcaatttgctcagaatgtttttcattactgcgaactggtacaggttttgtaggcaatttagttaaactggattcatccgggcgataaattaaaatacaacttgaaccaatcgggcattttgcaccagatgaatattctaatgttccagcttcttttaaaacttcaaaagctaaacagagatgatgtcccatattaacataatctgtagagcgagctctgatgtaataatcatctccgcgaatactaaatttaaagcatttgaggtcttctgtattgttggtcttaaaaatcatttgtttatctagacctttagctaatcgagcacccaatgctaataatcgtcgttgattttcccacaaatccgcaatcatttggtcgaatgataatttcggcattagtcgaccataaaggtcatatcctttattataattacgaagaatttcactcgcattaatacgagacaatgctccaattttattaagggctttcataatacgattagataaactcattccagacccatttgttcgctgtagatgtttttctaatccaaacccaatatcaactttaaatttatctaaaatttcggcatgaacatctctgtcaataacattcaaatccaaagttgtgttaaatctatgaaaaaatttatctggctctccacgacgaaatacagtccattcattcaattttttattaactaaagatttaattactgcattgacattattaattacgactgacatattttcctcactcaatttcaattttactaaatatacagaataagatggaacagactatataagcaccacacacagattgaactaataccattccaaagaaccaaacgatattatcaaacaatgtctgttttacgtcgaaaggacgtaaacttacagtaatattatcacctttttctattgatgaatacatctctggggaaatatattcactaaatctataaccgtctttgagttcatatacggcaataaacgataaactagacccctttccttgagttcctgtaagggtattaactacagtaacatcataatctttataatgcatataatcattaatagcataataaccatatgcaattactatacataaacaacatatcaataaattcaatcttttaattatcaactgtttcataataatctcaattaaaagggcttagaaccattataccatccttggtataaagcggttatgcgagtaccgtctttaaccgttcttcaaacttccgaagagtattctggcgttcagctctttgctttttgtaagtttcaatacgctctgaaatgagagtgtatcgttcatttactgagtctttcataaaatcaggaatttcacgagaagctttaatctcgtcaaatttatcaataacagcttgctcttcagcaattaagttatcatacatcaaaatatctttcttgatgaactcaatatcttcttgagttacacgagataatttagatgctttatcctttttgtactgttcgttagtatcacgagaccagtgtaatgtacgatttttattcgtattcttgtaaatttctacaataccaatctcatcgataataacgatccaattccaacgggatttgtaaatttgtcctccatcaaccgtgatttcaccaccgattgagacatcattaaagaacttgctttgagcttcagatttaaatttaccatcattgtagtttaccaagttgaaaatatctttagcattcattttctgttcctccgtagttgatagttgtataataccacagaggaacagtcttgtaaacaactaaaagaaacttctttcacaattttttccactgaaccaagcgctcactgctttcttagtctcaggagcagtgttatccataaaccattcaaaggcagcctttttatgattctggagggcttctcgggctttaatctgctcacggtctattaacactaacatatgagcctttcttgtcaccaagggcttcttatgattttttgaatactcccaatcatttgtccaacgcattgtcgttgcgaactgaaatactgcttctttaattttagtttcgtaaatttcacgagcctttgagtataacatcattacctccatttaccagtttaattctagtcatctttttgatggcagtccatataatctatttctgaactgcctttttgtcatagaaggcctcttatgaattatttcagaagagtaacctcagcaatttcttcccagccgtttttgtcggtcataataaagtcagcaagataaagagcagtacgcagtgaaacattgcgtaaacgattaacattgactttcatccatgataatgctttataagtttcttcatcagaaagaccgcgcttttgcatcatgtcagttgaaagaataacatcttcaaccctgaccataatttcttcattagtgtgaacacccaaatccaaataaactgagcgggacactaatgcttgtaaatgtggagcaagtttagtaccacggtctaattcgcggtcaatgtcaacgtttgtgataaaaacaatcgttcctttaaattcaaactcgcgctcaatgcctttttcttctaagtaagaagatgcggtgctccagcagactttacgggtctctccagtgtccagagcagctttcagaagattaagaatgtccatatcagagaaaacatccacatcatcaatcaaaaggacagaattctcttcacgattattccaaagctgctcataaagaccaataccagagattttaccattaatgcttttatactcaatgtatccaatatcatttgctttatttaaagctttatctaaagaatacgttttaccaatacctgctgctcccgagataattaatgaacgaatgtttccgttaataataccattcgtcatcattcccataacattaaatcttttattaatgcgggttttcatatcttcatacgattctttaacttcttcaacttttacaccatcatatgaaatgtctgatttgtaaacccaaacaccgcgacgtttaccgtcaatttcaacaaaaactttaccatctccttgtgcatctaccggagcattatctgggaaccattcgcctaagagctcaaaagttccagagatttctttaccgaagtagatacccttattgatagttacagttttcattttattctcctttgatttgataggactactataacatagtcctatcagtttgtatacttattttgacatttcttcgatgtcacgacgatacccgtcacgaacttcacgaagagcttcaaggccacacataggctcgataccagtaatgtgaacttgattaatctgatactctacatcttctaactgagcgaaaacataacgacgttcagctgcacaaccagatttagctttaccgaaacgtttattcaaagtagtcattttgtatctccaatttactcatttgttttgatagttgtatagtaccataaagctttatgcttgtaaacagttttgtgaaaaatttttgaaataaaaagggagccttcgggctccctatcatttataataacttcggtggttttcaagatagaccttctcaaggaagtcatcccagaaactcatgtctactttttgctgcataccgttcttagaagcttcagtagatgctgcttctacttgatcgaccacatcttccaaaaactcttgaactgttttaaatggatgtttacccaacttcacgtcgagaataaatggagcatcttggagtggataaaccaagtcaccagttttgtaaatttctaatagttggagtccaccacggcaagcatgactcagagctttccagtcaataccttcattggcttcggccttacgagcacgttcaccatattcagcatctaatttgttcagtgactgcttaagctcaacaagagaaagcgttgtctgatatttacgacccaacacagtgtagaacgtttgtgggcctgttttctcatgattatggaacacccattcacagaattcgttttctggaagacgatgcttaatatcttcaactttagtgcgacgctgcttaatagaaccatcttcttggtaatcaatccactgctcagggatttgattaactactttcaatacatcacgtaatgcagccaaacgagaacccttgacaccgtatttagaagcttgcttgcgaacatatcctaaataggatttcatgttagtcgtataaaaacgagaacggttgtcttgaataaacttccacacgtcaggcaaatcagatttaaccactagttcaggtggagtgtgaagcatatccaatgctacagtttcaccatctgctgctaatttaaagaaatatttaagactgtatagttcatggtcaatatcatctttagtgtttttagatgatgtgttgttagtgtttttactcatatgctctttaacgtttccgataagaatatcacgagcaggaggaacaaaaatttctttaaaatctacatccgattctggagtagaagttccataaagatgactaccaaaatagcttttcattactgttttcatcattcagccttatattcaataacaggacatactttagctttacgggcttttaaaaattcgacgataatagatttcttgggttgaataggaggtaaacctttatacgccctatcaatattttctacatgtaaagcataatcctttttccatttataatctttatatttttcatgcagttgtgcaggaataacaaatgaaccaataataagtaaaacaagcaaaatggcaagtataaatgccgatggaataagagtccataaactaccaaaaataagccatttctgtatgatttctgcgcagataatagttagacctgcgagtatagtacatccgaaaaaagaaacgaaaaatwgtagggataacaatagaccaaaagtatgcacatagtgtcttaggtcgttgccattcatcgttaaacaatttgaataatttatagtgccaagagttttcattaataatcataattatcctttcattgaaggcgtaacggttgttaaatacttaatcatagcttcagcttctgattttgataatgaaatttctccattgttttgacgaatagaaataaaatccggatgacggtcaccaccagcttttaaaacacacatataagtatcagtttcatcttcaatatttgaaatgattgaagcagttccacatgaatgcggtttttgataaatcaatacagcttttcttccaccgtttgactgttcataaacttttaacacatcaagcaaatcagttcttttatcaatagctaaaatgttattttcatcttcaatgttaaatccttcggatacttcataaagtgtcacccataaatcgccaatatcaataacagcgttcacttttccatgactttcaagagcatgacaaattttcttgatttcgtcataactcattttaataatatcatctccttgaataagaaagatgtcatttttaaattcaacacgaattaaaccactttcacttgaaataaacatatttcctcactttgaaatcatagttggaatgacagaatcaagataagtctttagtgcaatagcttcgtctttggtaaatgtgacaatatgtgctcgaaaatcatcaatttgacgaatagttaagacatctccatcttcataacattttgatacgtttaaaacagtttcatcattctgattgcaagcgctagtaataatagcattgcaatttttaaaccattttaaactatgttttctttcattagaataataaaaatatttaatcttatctataaaactatcccaatggataactgataagcatattgactcgctttcaatattaaatcctgggcatgaagaataaaaatgaattttatgctcatcattaatgcttacaattttatcagtataaggattttcaattttggttaaatgaatgatttcactaggcgtaaaatacagcatatcgtcttcttgtgtcaaacgatacatattatttactttttctatagccaattcaccaaaaagtgaactaacttctaatactaatcgtttcgccgctaccgtcattacatactcctctgaatcatatcaataatgttgttcaccagattataagtaaacattgggtaattatattgaatcattacatacacaacaaacaaaactttcattctcttctccttggcagttgacaagattactataccataacattgccaacttgtaaaccattaaatgacgttttcgataaaattctgaagctttgtatgagcatcaaccatgattttcatttcttcctttgcgaaagctgtacctctttcacgagaagaacattcatagtcagaaactgcattagcatattcttcaattagcttcattaaaaacatctgcttttcagttttcattattccacctaatcatttcaagatattgaactaacttagctttagatttatccaaatcctttttagctgcttctataccgtcgtatgaatatccttcacaatgctcaactgctaattgatatgaatctatttcaatatcacgtgctaatttaatgattttttcaaactgttcgcgtgttagcatacttaaactctcgtattatgatcgataatttcatcaagaaacatatctaacgcttctaaagcattatcaactttagcttcaagttcatcaatacctttatttgcaatgcctgacgaaaaccaagcaaagtcactaagttcctcatctgctttacgaattgaatccactaattccttgattttatctgcttgctctatactaatcattattccaccacatatgacagagagaatattgcacacgccatgtgagttgcaacttcatcacacatattataacgtttcttaagaaattctacaagttcttcactagtaacttcatccatgtcgacgaaaaaatcaccattaatgatgacgtagatatttccttcttgattaagtgcttcaattttcatgatgttctcctctttatctgatggttgtatagtatcacagctcaaatggaaagtaaaccggtaaaatgaaaaaagtctcccgaaggagactaatgttattcgagggaaagaagatatttactttgataaaacattccagtaatatcatctatcgtgctttgaatggctggaggcatttctttataaatgctgttagattggtctagtatgcgatcaatcattttaattgtgtcggtaggaagtttactggcatctggaattgaaggcgtgtattttctaccagaataccccaaatattgctcaccaaatttatcaatcaaatctggcaactcggagaaaataaaatcgtatgctttgtgtctagcataacttttagtttcaaaatgtgcagaatgaaaataagcttgtgcagccattaataaacctaagtattcatctgcctttgaaggttttccactttgtgaaaagtcgctgaatttcattcagtctccaatttaatgttcataattctagcgtatgattgtgccatctccgcgcctcgttctatacattcaaaatcagaagagcacgggtcatttttataggtcgttctcataaaactatagaattgttcagacgattctacgcttttattttcaaaaagtgtataaacgtgcctaataccagattccataaatttatcaaaatgaggatcgacattcgcttcaatcaatggagataaaacaaatgacaatcctagcatggcaaaaagtgccgttgcttttaaggccataaaggcctcctatcatttttgtcctgtatttactttatgccgatgcacggccttaactttatcaaggtatttttcaaaatttcgcaatctagtatagtctgccggagattggttgagtgatacttctcgacgcaaagctgaaatgatatttccaacttccctacgaatttcatctaattgaagcacagtaagattacgaagttgcttttcagttaattgtagcatatatacccctttagttagataaacctatttataacttttacactaaccgagctttttagttaattcattccaatgttttctgcacaaagaaacataaatttcatcaccaatacagatttgattaccttctttaactggtgttccatcttccattaatcgagctgtcataatcgcttttttaccgcaatgacaaactgcctttagttcaataagtttatctgcaatcgctaaaagttctttagaaccttcaaacaattttccagcgaaatcagtccttagaccataagccataacaggaacattatatgtatcaacaattcggcttaattggtgcacctgttcagtttttaaaaactgagcttcatctacaaatacgcaatgaatatctttttgtgcttcagcccatttatagaactcgaaaatatccatatcatctgtgataatattcgcttcctgtttaattccaatgcgagaaacgacttcacagacagagtcgcgagtatcaatagcaggcttaagaactaatacactcattccacgttctttataattatgtgcagcagtcaaaagagaagcagattttccagcattcattgctgcataagtaaaaattaaactcgccatatcaccttcttaaagcgtattcacataagctattaattcattttctttcttatcaaaccgatcagcaaattcttcctgctgttcgggagatagcgggccgtattcatcataaaaggtgtttgcttctgtatgctcatctagaagttcatggataagctcaaacaatttatctttttgttctttgcttagactcacagtatgtcaatccccaaaagttttaaaatgactcgtttctgattcataaccgctacgattgaatgaccgttggggtctttttgacctgatccaattataaatcctttttgcgcagaaagttcaatcaaaacatcaagttcacgtaataattgatattttaaatcatcattcattttggtttaccttctttaacgaaatcaggataaggataaaatcccgaataaaatccttcacctttatgattgatgcatcctttattagaacaatagcaccaataatcgaaatcacaagccatttcatcgttgcataaagcaaaaacaaccggccacttacacttttcacagtgggcatttttaagaatattagtttggctcataaccatgtaacctttaagcaatattcttctacatgttgtttacgacctttcttatcaataaaggtatattcaacgaatgttccaatgtagtctttatctacatcgtgtggactattaattggacatttagtacggcaaatgcgttcccattgacgaataattactgctttgtttttaggatcaaacggatgcgggtaatgtactttcataatccaccactattaaatcaatatcaggagtaaacatgtcgattaatttagaaaccttatcccaatcgccgccagcaataccacaacctatgcgtggaatgtaaattaccggtttaaacaaaagggtttctgcctgtagatttaattctatcatgcagtttactaaagcaccataatcaagattaggacctggtttgtattgcgtatacaagttataacatatgccaaaaccattaggtttatgtttaaaaacaatagacatatcgcctaatttatcacgagaaccgtactcagtagtggttttatctatttctaaaattttgggataggctcttgctaattgaccagctacaccactgcccattgtatgaaaacagttacacccatgcgcaataatattaccttcaagaaagagggcgacaatatcgcccttgatatattttacaatcatctagtactcaatcctcgattataagaatctaccaaacggtcaaccattgaatgacaagcggctttatctttttcctccgcaactgaacattctaaggtattccactttttagcatatcgttttaacaatgtatcgtttttgtatctgcttgatttatctctttctccgtctttatatgcatatattaatttctgcgcaaattcagcttggcatgctttatttttcccgcaataatccgctgcagtacggtttacatactctctaatttcagtatatgatgtatctgctaacgcagaaaatgaaattaatcctatacataaaaccaaaattttagtcatttactatttccaaaagtttattatttttaaggtaattagccttttctaggacttcagaagcatatttagaacctgctttaacattccatcccgaattataagaggatattgcttttcttatatcgcccttatgtatatttaaccaataagaaagttcaatgtacgcccaggaagctgaattggaccgtttattcaacattctttttatttcagcatcggtcatattataaccaagttccttaactcttgctcgcatagtaggcaaataattttggaacattccgtaggcgtgatgctttggtttagattttaaattaactccgccagagctttcttgccataaaatagcagccattatatgacctaatccgctcttgtggatatttttgtgtgttttatattttccatccttagaaaattgttccccgaattgatacgcgtaacgcatgttatcgagttggacattactgaaagtatgctcggagctatgtgccatcattgaaatggccaatagaccagcgagtagtgcttttctcatgcttacctcattgagttttaattactgctttagaagcctttcctggtaaacgacgactgttgataattgccatcctgcattgaagtgacgggtttttgaacttctcattaggcttacaaaccgtaaatccaagccaaagatttccatctgtgatttctaaacgtccaggacgatattcaaccccatcaataaaatcctcgtcaatgtcaggacgcggaggcatactcaggaattcattaacttctaaaacatggtcttttattttatggaataattcaaaaacatatgtctcatcaatctcccgttgaattgcacgatcaagaagatgctgagaatattttagatgaaacgatgagacccctgctgcttttgatgcctcacgaatctcattgttaatttgacgaaactccgactcaaagtgacgacgaagcttatttcgacggataaaaacttctgtattgatagtcatgttattctcctcttaactgatagaaaaattataccacagtcaagaggaaaagtaaacagttattctttaaatctaatcaatttattcatagactttgaaacttctgcacgaacctcatgtaagtttttaagctgttcaagacgctgctcatagtaagcaatttcatcttcttcgagacagtcctgtgaatcttctttaagataacgtgcatagtcctgaaaagctttacggactacttcctggaagtcatcaagactttgaattttcttaggagcggcagatacacgacgaggtgcagtataatactcataaccaaaccctgcacttaattgagccattagtatttttcctctggttggaacactgcacgacaagcccacatactggcttctttgagtttcgttttagcaatagttaactgatcgaggctttcagcataattcttcgcgagttcatcatcttcacagctatcaaatgcttcccagaattcatcgtataaagcgtcaaagataagtcctaaacgaacttcagcatctttgatagcattcactttaccgattttctcttcagtatgcggcttataacccttaatgtcttcaatcatatttgacttcctcaccagtacataaatcatattcaactaaacgaataggttcatgaatgccatatccctgaacagaaatttctgtcgtaggataaattccatcaatatcacccatattccaggcttcattaaattgctgttcgcctgaattactaaaccactcggcgaaagcatttaacacatctttagaaccttcaataattatctttgccattataagctctcagtaaaggtacgagcaataacatcgcgctgctgttccggagtcagagagttaaagcgaactgcataaccggatacacggatggtcagctgcggatatttttccggatgcttaactgcatcttccagagtttcacgacgcagaacgttaacgttcaggtgttgaccaccttcaattttaactgtaggttgtgtttcaatttcaatttcacgggcatgcaaaccgtagaaaatttccgggtctacaaaagagtcctctttaaaggttttagagacaataattcgtgcttgaataccatcttcaaaataaatagtacctttatgtgtgccttcaagaatttgatatgctttcatataaacctcaattagaaaataaatttatccaagattgttctttaattaaaaatggctcagaatcatatgccattaaactttgggtgattagtcctttaaaaggtccatcaataaattccatggtaaaatatggaattttattcattagccgtgcattaggagcagtgcacaaaactctgcatcctttgaatacgcctttttgtaatttgtattgcttgggataaaattcgctcaaaatgttattatttgccaaaatttcaaaatgattcaccaatttatttttaatagtttttggcgaaaaataaagatattcgaaaagctgcgtgtctgtcatcattgcattccgattacgaaaaactgcggacgagtaataccaccaatgcaacatttactattacagcagtagtgtacagtgtcaatatggacgctataaatcttatccatatcaggagatttgacaggctcatcaattatatacaaaattcgcgaaagcgataaacctctgaacttacttcctttattaccgataaaactgcgcacagaatcagtaaataaacgaaaacgtatatcatcattagaataacgcgaaaattcctttttaatgttatttgcagaaattttagcgtaagctgaagtattagaaagaacaataactgttccgccatcatacagccaattagcagcaaagttagtcacagcaattgatttaccggattgacgtccaccatctaatcgaagtgtgcaatactgtttaagtaattcttcaaatggcgggatatattcgtttttacaaatttcttctactctagcatcagaatggtgtgtaaaagcattcatcagggatagataaggaccagttaaaaatgttctcattttattctctctaagtttgggccattccgtggcgcatgaattgtccatttctgtatttacccattaccgcacttgggctcgaccttattacaggttggcgggaatccctcatagaatcatgaggtccagcttgttcccatatttcttatttgcttatttgaatgatttgacgtactgaacagaacctttactattcacgaaagcgattttaccatttttgttatacatggtagcagtacgctgataaccataagtttgtttaccagattgataaccaactaatgcaaaattatcttcacccattttattctgtttagcgcgaatgcgttcatgaccatgtgccataagaaccttagcatcaccagttgcaatggatcgacgagttttttcatcttcaactgcattaacaaagtcgtcaaatgaatcaaatttagcatgagatttattatacagttttccatctactgcataattatatccttgtacatccatctcaacttctgtaccatcatccaatacagcagtgattttttgaccttttttaaatttcaaaagatcagtaaaagattcagcaataatttgagaattaatagctgcttcagtaataaattcttgatatgttttcatgtgtttcctttaatttttattctttagggaagtttttagaatatgcatcataaagcttatttccaatacggcggaaaactctagccgcaaaacgattttctgggtttttaatcatgatttgcatcatataagtacccgcgtcagaaagagcttcttcatagtacccgttaatttctttaagagtcctacgtttaccgccaggaccatcaacagtgattttccatttacctgtagaagtgcgacttggcggctcaacttgttcaatccagatataaccgccttctacacgttgtcctgcggcagattctgcaataaattctttatacgttttcatatgtttcctttaaatgtaaatatttttgccgtaatacttgtaccagtgtggcttcattaaaattttttcatcgagtcgttgttgactcaatttaatagctgatttgcatggattataatcatttttccattctgctggaatatcactgatgtcaggaacttcagtatcttttatactaaacccacgttttaagcattccgttataatgtctgattgacgctttcgcaaaaattctaacttatcgtaaaagaacgtaacatgaccagaacctaaaataaactcggaagatattttaaaatctttaacccgcttaccatttgccaagtgtttacgaactataccaaaaacacgtggcaattcacggtattctgcgattaaatgctgatcagcaagttcagatactaaagtcaaattaatacgagtcattttatccctccaagtaactgtgaatatactatcacagttctaggagaaagtaaacaactttatagatttttatacgcgtcccacgtaccagttctaaacgttgcaatgactcgttttgcgcgattaggtgtttgattataccatctacttctagctaagttaactgctgcttcatcccagcgtttttgttgaagcatacgtaaagagttagtaaatcctgctacgccagtttctcccatttggaagaccatattaatcagtgcacagcgacgaacagcatcaagagaatcataaactggttttaatttagcatttctcaaaattccacgaacagcagcatcaacatcctgattaaagagtttttcagcctcatcttttgtaattacaccattgcaattacgcccaatagctttatctaattcagatttagcaacacttagtgatggacttttagtaagcaaatgaccaatgccaatagtgtaatagccttctgtatctttatagattttaagtctaagaccttcatctatacgtaacatttcaaatatattcataatacctcctaagtatttatagaaggtatttataaaattaaaagaggttgttcattattcggtaaagtgaaggacccatcacatattgccactgagtacgaggaataagagcaaaagcgtccatctctggaatcataacaccatctttattttcaaaataagactcgcaacagcaatttctaaacatctcatgctctactggaatcgtataataaaataactgtaagtctttattactagaatatttaaatacacctaggtcttctagaaggtctggattataattgttaaaaccagtctcttctgagcattctcttcgtgctgcatctaatgcgcttaaatcagaattttctacacgcccctttggaatatcccagcgatgtgccatcattccaggcttacgagaaccagtaactcgtcccataaataaatctttatcttctgtcataaagataataccagctgataatgttttcattttaatttcctgcattcagtgataaagttatttaaattttgggtatatttcttttcatcaaaaatcttttgctgcctacgtaaccgccatggcatttcaatgaacgtgtaccatatcccagataatattgctgctgtaaaaatattaacaagtatggttaaaataatccaatctcccgttctgtctactggactttctccaaagaagcaaaatacaaatgatgtcacaggaaaactaataatataccacagaatcataatcttatctgtgaaccaatcagtgttcgttaatttagcgcgaccattatgaatacacacgaatttatcatctgttgcagtagatggcttaactggttgatatcccattctaaactccctaatcagcaaatttttcatatcttcggaacagccattccagtcaactctatcaactgaaatgccatcatccccatcatctaaatcataccagcgagtttttaaaatcatttgattttcctacaatcattcacgaattctttcattgattcattttcaatataagacatgtagttattatattcttttaattgtattttgtaatccttttttctttgccaatttattttaaaattatcataatgaaaatataaaataataccaaagaatgaaaataatgaaatcgctatagtataatgaagttcactccaaacttctattatatctactataccgctgacattactgcggatgtttaaaatagtacagtcaatcattaatccaataagactaccagcaagagctgcagccaacgccacagcaaaaattaaaaatgactcagaaaaagaatatttgactttatttagttttggcttttgcatcgtgattccttaacaaatttcataatttcgttaaattcatgcatatctaatttaagctggtgttcctttttaatctttttacactgagctttccattcacgtacacgtttacgataatgccttccttgataccaatatcctacccaatttacaggtaccaataaaaatggaactactaatggaagaattaatactaacaaaaatattacgccagattcaatatcagtcataacgtctataaccattccagcaatcagcagaatcacaaatgatacagctaccacaggacctattaacacatcagtagaaattatctgacgctttaattcatacttcaacggtttacttggaaggtatagtgatggctttgacatattctctacattccttaacaaatttttctagtaataaatcgctttcaaaattgggattttccacaaatttatcaaaaagatcatcaacaatagttaagatattctttttactaagaatacgcttattttcatattttgtttcagagtcaactataagagtaaagaaatatttctttccctgaaattttaccgtagtatcaatataaaataaatttgatttttgtaaattacgtttaaaccatgcatcacttaaactataaacgccaagataatcataatcgtcgtttaaataacaaaccgtccattcaggagaaatgaaatcagtaaattcaacatcaaaatcacacgtcaatgaatgaattgattcaatactgttaatgagtattccaggacgtattaaagactttttacctctagaaaatcttccggaaaggctttcatcagtttcatatgaagacccccaatagtaattacgtccttctgccatacgtttaagagcatttagtaattgatctggaacatcaacctgtctttggaactcttcaaacattgaattgaaatcactttgcattttcattcctatttactccaagtaataggggccgaagccccttatcattatttcagagaattaatatattcctgaacatcagcagaggtagtttcaaccccagaaatattgccattaaaggtttcaactcgggcaagagtatcttcaatatcaaccttagtcaacgctgcaatttcaactacatcatcagcagtactaattccgagggcattcgcggcgcgagtttcacggatatattccaatttaactgcaagttcttggcgagcatcatctaactcaactactttcttggcgatttcaattcgcatttcagcataaccatcagctttagtagtcaactgctcagctgttcgacgatatagtaaaccaagtttagcatgcattgttacatcttgaccttccgaaagaagcttgcgaatttcacgctcttttgattcggcctgcttattcttttcgacaataagttcacgaatacgcttttcttcattaatagatttaacagaagcagtttttagatctttaatcttatcaagtagttttgctgctgcagcagtatactgttcttcaacagatagatttttagccatagcagaaccaagtttagtgcgaataaactcaacaattttcttcagtgtgttcatagtatttccttaggttggtataattagataatatcacgttttaatagattgtaaacttattcttcgtctagctcgtcgataaagacgttgatggcctcgataacggcatcattgatagctaataaaataaaatcatcgtcagtacctttagaagattctaaagcattgatatatgcttggttggcgagttcccaagcctttttaaaataaggagcttcatcatcaggacaaatatcccgcacgccttcaaagatacgtttggcataatctaacacccattgtacaggcatgttttgagaacgttcgttaaactctttaaagtccttagattcaaaaagctcttcaggataattatttctattacaaaaagctttactaaagttacgtttcataatgttttcctcatttgtataggctcataatatctcaatcatgagcctatgtaaacttatttcatattattgaaatattcttctgcgatttcgtcgttatcatggtaaactttagaagacagtttaacataactttcagcagtgaacatgttaatcacaacctttacagtataccactgaccgtcttcattgcccattaccgcataagtttcaaacatcggatgatcaggaccgataactttaatatcattcactgtacgaccgaaatcttctgaaacacatttcataaagaagttgaacagttcgccgtaattatccatttcgttctccaagttgttttctgtatcagtagttgatagttgtatagtaccatggaagaacagggatgtaaacagtttttgtgaaaaaatttttaaaaagttttagggaattctagggtcaggaggggcaattaaaagataggataatatattataaagggtagaaactaaatgatgcctagagaggcccggaaaggcctagataccaaaaagccccaaccttttggtcggggctaagaatgttatttgatttgtttagcagaccaaatgcggtctttaataattttttggatgtcttcaacatactctaggtcatgagcatgtgggttatctttgaaactataagcacgagctagcttttggccttcagttttgattactaaaagctctttaaggatagcttcatatttagagataattcctttaacaatattttttttcttgtgtagttttagggtctgctttaggagcaggtttacccgaagcctttgcaaaagcagcgccagtagcaactaaacttttccaggccatactaacagcattccccgtaaatccttctgctttcatgtcgcgagcaaattggaatcgtgattcatcagaagcatctttataggaatatttacccgctgcaatggctgcttttgcgacagcttgaatttcggtgctagacgcttcatttaacaccgcttcatttaaaaattgagtatatgatttcatcttatttcctgttttaatttgtagatttaatatacttatttatactaaaaagccccaacctttcggctggggctaagccttgcggcaaccttgtcggggttccacctgctaaggcaagtgtttgtacgaaacgccgggattcgaacccggttatcaagcagttgacgctactcaatatttttaaaaggccatatctcgaccatatccgaacgttccgtcaaaaacgctactcggcttatggcaaagatatttcctcgaatcgataattcggtgcgccgtttctgctgtgatataagggggcattaacaaaacataaagatttattaatgccagtccttaaacagggaacatcagtccgacgacttaccggtagcgacccggcttcttgtttggtcgaggcagtagggatcgaacctacgacctaggacttagaaggtccttgctcttccttctgagctatgcctcgtatttggcggacgtgataggattcgaacctataaccaatcgcttaacaggcgatcgctctgccattgagctacacatccaaattggtggggagtgatggagtcgaaccacccgagtcgcaatgacaatggatttacagtccacaccgctacctctacgggataactcccctaattcataatttggtggccctgggtggaattgaaccaccatctggcgattatgagtcgcttgcttgaaccttccagctacagggccaaattttcttattttatgtaatatttatttaaaaactttctagcttgagtatggctaacatttatagcgtttgcataatttttaataaaacctcgttcatccatattaaaattttctaatatttttaatcgtctagttatctcatcttgacttaatgtacttgcattatttttagaaattttttctaaggactgtgccgagtgttttcgaccattaaaattaaaatttttagattttggaggaaatctagcatttaatctcgcatcttttgtattttgattattagttgcgcaatatatgttatttaatgaatatggtcctttatcgccaaaacggcacatgcagtattcatgaccctttcttccacgcttatcataatttcccgttgatttccaccaatgcagccattcatcaaaagttaaattccattcaatgtttctacgtatagcagaattccgctgagaaatatattttgcataatcttctttcatcacaaatttctctacttattcaatacactgagctaaatcagcaaaactggcggaggcgataggatttgaacctatgagtcgccggagcgactgccggttttcaagaccggtgcattaaaccactctgccacgcctccagtctccatacaaggatttgaaccttggacctcctgatcccaaatcaggcgctctaccaaactgagctacacggagtaaattaaattggagcggataatgagaatcgaactcacatcatcagattggaagtctgaggtaataccattatacgatatccgcaaatttggtgcgagaagtgggactcgaacccacaaggaaatcattccgcagcattttaagtgctgtgcctttaccaatttgaccattctcgcgctgggaataaaggactcgaacctttgcatcctggaatcaaaatccagtgccttaccaacttggctaattcccaattattaacaaaggctctcaagcaagaacccttgatgatagagggtattaatcagtgcggtatgagttaataataacaaataattcttaaagcaaattaaacattttaacagtcggcaaaacaatttctttttctatataagagtatttaacactctcaactacacgcaaaaaatcataatcataatactcagaagcatgaccaagaatatcaataaggccttcaaatatcttattaccattcacaaagaataagtcaaatacacgttcttcatcttcttcggatttattaccaaggtcaacttctatatcaaagacctttttaatgaattctggataaagttgttctgagaacagtccttcaaccaagtattcataaataaaaagcgattgctcgctgaacaagccattaccacaataacgttcagctttagtactagaatgtctacttttaaacttctttaaaagatattgaaattgtaagatttcatgctcttctacgccaaacagtgttttagttttatagttgtcaccatcattttcccaggtagtgacatcaattacgtaaccctgtggaattgtagtacctaaacaaatattcatttgctcaccatattaatgtaagtatattcaatacattcaagacttaaaggattcttgaaaatatcatattcaagaggacctttttctgtttcaataaagaaatcaaaatttactgtattaaatttacggtcttccttcactaatttaacctgagaagatgaacggtcaatgtaaaccttttcaacttcaaaacatgttaaaatgccataatcatcaatcaaggctttagccgcgtcttgatcatatttatatccattttcaatggatgatactttcgcataaagaatcattatcagccttcatcaacaatagtatgagtatgggcatttacaatttgccaccagtcaaaacgattagaaccatacatcggtttattttcattttctttaataatatcacgaagttcatcttcggtagcggctttcgcgattaaatcagcatatccaccacgaggataataattatcacctgcaaaaagtaaaaagtttggtttaatattattgaactcttcaagagtaataacttttcctgatggtagttgaacaatctctacatatttatatcctaatttttgagcagcatctactgcttcaagcaaagtatcatgagcccatccaatttgacaacctggcttttcagatggattagcctgataatccgcatacactttatacattctattcacctttagaaattttatccataacgatagcaattaaaccaattaaaaatgctactacaagtgaaaacacattttctgctgtagttaataatccgcatataaatccaacaaacattgaaaaactaaaagcagaagcagaaattgcaatagcaacatttcgaattaattcacaacgtttcattttattctcctcagtagttgatagggtaatagtatcacaactaaaaccctatgtaaacaactttgtgaaattattttaaatcttctaatcgtttcttcatcttagaaccgttcttagcgatttcgcctgcatcagagcataatgctaaaagcgctttaactttagtttggtctcctttaaaagatgaaggatcaacagcagcagcaagttctttaatacgagagaaaagacgctcagcttcagctaaagccattccaagctttacttccataccatgagaagattcagtaatagtagtttttgtagcaaactctttgaaagttttcattttattttcctaattaattttgatgaggtaatagtatcactacctcatcagtatgtaaacaactttatgaaattattttaaatcatctgcccaatcgagtttaagaggctctttgtattcacgatctaatacgaccggaatttgtacatcaccgctaaatgataagggcccaacattataagacaatgttatatgcggtgtgtaatcatcaaaatcatgtgtagcacctagtgcccgcgcatacatgtgtcgacagcgcagatattcagaatctagcacaagtacaagagtcgatccatcttgtgttttccatacttctaaatgtccagaagaagctacttcaaaacttccgcttgatggaacatacggaacatttactcttgaataacatatggtcgaatgaattttttctctaggaactggattaggaacacgtaaagagcgctggagttcttccagcgcatcaagtgttaattctgaaaacttagctgctacataaagacccgttgaaaagtctttaaattccattattcttcatcttttgcttcatcagtagattcagcagtagattcagcagtaagattcttgacagcttcaacgatttcttcaactttgatagtatcgccagtgatacctactgcacgagcaatttcagccaaagttccttgcagaattttggattcttccatcagacgagccgcctggtcctgcgtatcaaggatacgagacttcagagttacgatttcagcagacagtttttgttcaatagtttgttcagacattatagtacctttagtgtatttttaattttagaaaaaagttcttcaagagaaccatcgtttgtaattactaaatcgccatcacgaattggcaatccagcttctgtaatatgagtatcattggatttttgaccaggacgaactacatgaattactgtagcacccatcgccctagccgcatccatttcatgatcttgacgagtatcaggaacgatataataatcataacctgagttaaatttatcaagataatctaaagcaaataattttacccaatacatgcggtcgaagttattaacaatcaaatccgtacctagggcttgcatcagacgacggactgaccattgatcttcaatattatttataacgtcagcaatcttgttaaatgctacgaaattaactgcgtcatcaaaaacaaacacacctttaattgggcttttactattaagatagcaaaatgcttgttccataatcgtaattacttctaatttagtcagatttaaattagtttcacgatcatagtcaattccttcaaactctttacgagttaaacaaggatagtcagtgtttgctgcaaatacaccccatgcataagccaatgcatccttaataggaccagcaagttgatatttaactgcagaataattattcataataaaatctgcagtagtatcttttccactacgctttacaccacttaaaaagattagtttcatatgtttctcctcaaatttagttaagattataacacatgaaactgaagcattaaacttctgctataatttttccatctttttctacttgaaaatacgtataaggaatcgttgctgtgcatactaaggctgggtctgaatcttctgtgtagctaaattctacttcagacaggtcagaaacccaaggcttataaaagtttattgacatcacgatttcagttttactattatctaaaatgtaaagcgtaatgtattcaggacctgttttttgggcagtattttcgcctgtaagatagttactagttcctagcatccattcatacattcctatccatgatttaagctcttcatcaactataaatctcacgatgagtgggtcgtactcaaatgtaacacctggacgttgtgctcggcctagtccaaacggcccagtcacggtatcagtaacaggtatcctaattcccggaataggaactgactgagcatttaaagtaaaagcagatgtagtattactatgcggtattgatactacaaagttagttgtatttgcttggttaaaaatttgttgtagtgcttgcgacatatattcctcataatgcttcataaatgttggtggtataatgggtctaagtcccttccattcaattccaattagaacaaacaatagaaaagaatggaagataatagaattagatatttgaccagactttgtttgcagagaaacgttttccttttgaaacgaactgctgaagtggcattaacacaacgttcgcccagtctttcggggcgatttcaacaaggctacccataatattaccaggtatatatgccttaatcatttggtctgcacccctaaatcctttcacttgactccaatcaatttttaatttcgttttattagtaatagtaggtgtatttgcatattgctttaaaagctcttctagaaattgctgacgagctttaggtggaatatagtgcaagttcaatccgtacattaagttatgcttacctaaaccaagataaattatcaaaggaaatttatcccagtaaggaagagtttccttgtgtttagcatcataagcaaaagcatatattcgtcccggctgcgggcgaacaactttatgtccttttacttgcttaatagtttcagcaaaccactttctggttttattattaattgctgcaccttcattacgaattttatcgcgcaatgtttgtctgaatgaatttatcataagcagttgtctttcttgcttattgagtttattcattggttttgattcaagcttttgaatcttttcagccgttttaattcctgaagcatattttgacattgccgaagtaaacgtagagtatttgattcctctttcttcagcaaattgctttcctgtcattccttttgctttggcctttctgtattcaagacctatctgaatccatttcttttcgtttaatgattgcttaacctttggaacttggggagtgctttcattaattatttgaaaaatagccattatgcccccttaaagccaagagctcttaatccatcttctgttagaattctaaattttattccacgcttttcagctaaagattgcgctgctttccatttgtcagtattaacggaatatgtataaatttcattcataaatcttttcttcgctgcagttgttagatgtgctggtttaactggtggttgtgtttcttttttaggttttatttcaataaaaaattcttgtccagaagaatctttcatccaaatatccatgaagtatctacgttttttcccttctgcattacaaaaataaggaattactgctgtttcactaccccatgcaataatttctggatttttatctaaccattcaaaaaagaatttttcccaatttgatctatacgtaatttttttagggtcacctctatactttgatatatttttaggaacccattttccagaatatgccattggattctccttataaatagataatatatttataaacaggagggcccatgctctttacattttttgatccgattgaatatgcggccaaaacggtgaataaaaacgcgccgactattcctatgacagatatttttagaaactataaagactattttaaacgcgctcttgcgggataccgcttacgtacttattatattaaaggttcaccacgcccggaagaattagcaaatgctatatatggaaatccgcagttgtattgggttttattgatgtgtaatgataattatgatccgtattatggatggattacttcgcaagaagctgcttatcaagcatctatacaaaaatacaaaaacgtaggtggagaccaaatagtatatcatgtgaatgagaatggtgaaaaattttataatttaatatcatacgatgataatccgtatgtttggtatgacaaaggcgataaagccagaaaatatcctcaatatgaaggagcacttgctgcggtcgatacgtatgaagctgctgttcttgaaaatgaaaaacttcgtcaaataaaaataatagcaaaatcagacatcaattcatttatgaacgaccttatacgtataatggagaaatcttatggaaatgataagtaataaccttaattggtttgttggtgttgttgaagatagaatggacccattaaaattaggtcgtgttcgtgttcgtgtggttggtctgcatccacctcaaagagcacaaggtgatgtaatgggtattccaactgaaaaattaccatggatgtcagttattcaacctataacttctgcagcaatgtcaggaattggaggttctgttacagggccagtagaaggaactagagtttatggtcattttttggacaaatggaaaactaacggaattgtccttggcacgtatggtgggatagttcgcgaaaaacctaatagacttgaaggattttctgacccaactggtcagtatcctagacgtttaggaaatgatactaacgtactaaaccaaggcggagaagtaggatatgattcgtcttctaacattatccaagacagtaatttagatactgcaataaatccagatgatagaccgctatcagaaattccaactgatgataatccaaatatgtcaatggctgaaatgcttcgccgtgatgaaggattaagactaaaagtttattgggatactgaaggatatccgacaattggtattggtcatcttatcatgaagcagccagttcgtgatatggcccaaattaataaagttttatcaaaacaagttggtcgtgaaattaccggaaatccaggttctattacaatggaagaagcggtagctttatttgagcgtgatttggctgatatgcaacgtgacattaaatcacattctaaagttggcccagtttggcaagcagttaatcgttctcgtcaaatggcgttagaaaatatggcatttcagatgggtgttggcggtgtagctaaatttaacacaatgttaactgccatgttagcaggagattgggaaaaagcatataaagccggtcgtgattcattgtggtatcaacaaacaaaaggccgtgcatcccgtgttaccatgattattcttacggggaatttggaatcatatggtgttgaagtgaaaacaccagctaggtctttgtcggcaatggctgctactgtagcaaagtcttctgacccggctgatcctcctattccgaatgattcgagaattttatttaaagaacctgtttcttcatataaaggtgaatatccgtatgttcacacaatggaaactgaaagcggtcatattcaggaatttgatgatacccctgggcaagaacgatacagattagttcatccgactggaacgtatgaggaagtatcaccatcaggaagaagaacaagaaaaactgttgataatttgtatgatataacaaatgctgatggtaattttttggtagccggtgataaaaagactaacgtcggtggatcagaaatttattacaacatggataatcgtcttcaccaaatagatggaagcaatacaatatttgtacgtggcgatgaaactaagacggttgaaggtaatggaactatcctagtcaaaggtaatgttactattgtagttgaaggtaatgctgacattacagttaaaggagatgctaccactttagttgaaggaaatcagactaatacagtaaatggaaatctttcttggaaagttgctgggacagttgattgggacgttggtggcgattggacagaaaaaatggcatctatgagttctatttcatctggtcaatacacaattgatggatcgaggattgacattggctaatatacttccaatgagcgctgatttaggagaatccatggaaggttcttctatcgacgtcacctttaccgctcaattagaaacaggtgaaacgttagtatctataaatataactagttacgaagaaactcctggggttttagtagaagaaaatcgcttatatggaacatatgaatctgtatttggtttcggaaatgacgcgttgaaatatcgtttaggcgatgaatttaaaactgctgcttcatgggaagaacttcctactgattctgatactcagttgtatttgtggaaagctcctcaaaatctccagaagacattcacttacgaagtaacattaatatatgactaccaagaacaaagtgaatctggaggttctggcagtaattctaggtcatcttctgatactactgaaccgacggatcctcctgctccagtaagaaaaactctagttaaaaattacacaaaaactatagttggaaattggagtcgttgggctaataaactgagaagctatgtatatgagaggccataaatgtcaggattgagttatgataaatgcgttaccgcaggtcatgaagcgtggcctccaacagttgtgaatgctacacaaagtaaagtattcactggaggaattgctgttctcgtagcaggcgatccaattacagaacatacagaaattaaaaagccgtatgaaacacatggcggagtgacacaacccagaacttctaaggtatatgtcactggaaagaaagctgttcaaatggctgatccaatatcatgcggtgatactgtggctcaggcatcatctaaagtattcattaaataggatttaaaatggcaaatacccctgtaaattatcaattaacaagaacagcaaatgctattcccgagatattcgtcgggggtacgtttgctgaaataaaacaaaacctcattgaatggcttaatggccaaaatgaatttttggattatgattttgaaggctcaagattaaacgttctgtgtgaccttttggcttataatacattgtacattcagcagtttggtaatgctgctgtatatgaaagctttatgcgtactgctaacttacgaagttcagttgttcaagctgcacaagataacggatatttacctacttcaaaatccgctgcgcagaccgaaattatgttaacatgcaccgacgcattgaatagaaattacattactattcctcgtggtactcgctttttagcatatgcaaaagatacttctgttaatccatataacttcgtttctaccgaagacgttattgctattcgtgataaaaataaccaatattttccgcgtttaaaattggcccagggacgtatagtaagaactgaaatcatttatgataaattaacacctattatcatttatgataaaaatattgatagaaaccaggttaaattatatgttgatggagcggaatggattaactggacgagaaagtcaatggttcatgctggttcaacatcaacgatttactatatgcgtgaaactattgatggaaacactgaattctattttggtgaaggtgaaatttctgttaatgcttctgaaggagctttgaccgctaattatatcggaggtcttaaacctactcagaactctacgattgttattgagtacatcagtactaacggtgcagatgcgaatggcgcagtcggattttcatatgcagatacattaacaaatataactgtcatcaatattaatgaaaatccaaacgacgacccagattttgtcggagcagatggcggcggtgatccagaagatattgagcgtattcgcgaattgggtactattaaacgcgaaacccagcaacgctgcgtaactgcgactgactacgatacattcgtttcagagagatttggttctattattcaagcagttcagacgttcactgattctactaaacctggttatgcatttattgctgctaaacctaaatcaggattgtatttaactactgtgcaacgtgaagatattaaaaattatctcaaagactataatttagctcctattacgccatcaattatttctcctaattatctttttattaagactaatttaaaagtcacatatgccttaaataagctgcaagaatccgaacagtggctcgaaggtcaaataattgataaaattgatcgttattataccgaagatgtagaaatttttaactcgtcttttgccaagtctaagatgttgacatatgtagatgatgcagatcattctatcattggttcatcagcgacaattcaaattgttcgtgaagtacaaaacttctataaaacgcctgaagcaggtattaaatacaataatcaaataaaagatcgttctatggaatctaatacgttttcatttaattctggacgaaaggttgtaaatcctgatactggtttagaagaagatgtattatatgacgttcgtatagtatcaacagaccgagattctaaaggaattggtaaagttattattggtccatttgcttctggcgatgttacagaaaatgaaaacattcagccgtatacaggaaacgattttaacaaattagcaaattctgatggacgcgacaaatactatgttatcggtgaaataaattatccagctgacatgatttattggaatatcgctaaaattaatttaacatctgaaaaatttgaagttcagactattgaattatattctgacccaaccgatgatgttatctttactcgcgatggttcactgattgtatttgaaaatgacttacgtccacaatacttaactatcgatttggagcctatatcacaatgacagtaaaagcaccttcagtcactagtctcagaatttccaagttatccgcaaatcaggtgcaagtacgctgggatgacgttggtgctaatttctactattttgtagaaatcgctgagacaaaaacaaactcgggggaaaaactcccgagtaatcaatatcgttggattaatttaggatatacagcaaataatagtttcttttttgatgatgctgatccattaacaacatacattattagagtagctacagctgcacaagattttgagcagtctgattggatttataccgaagagtttgaaacttttgctacaaatgcttatacatttcaaaacatgattgaaatgcaattagctaataaattcattcaggaaaaatttactcttaataattctaactatgttaattttaataatgacactataatggctgcattgatgaatgaatcgttccaattcagcccatcatatgttgacgtttcatcaataagtaattttattattggtgaaaatgagtatcatgaaatacaaggttctattcagcaggtatgtaaggatattaaccgagtttatttgatggaatcagaagggattctatatctttttgagcgttatcaacctgtagttaaagtatctaatgataaaggacaaacctggaaagctgtgaagctcttcaatgaccgcgtaggatatcctttatctaagacagtatattaccaatctgcaaacacaacatacgttctaggatacgacaagattttctacggccgtaaatcgactgacgttagatggtcagcagatgatgtcagattcagttcacaggatataacatttgctaaattaggagaccaacttcatttaggattcgatgttgaaatcttcgctacttatgctactttaccagcgaatgtataccgtatagctgaggctattacttgcacggatgattatatctatgttgttgccagagataaagttagatacataaaaacgagtaatgcacccatagattctgatccattatccccaacatattcggaaagactttttgaacctgacacaatgactataaccggaaatcctaaagcagtatgctataaaatggattctgttggtgataaagtttttgctcttattattggtgaagttgaaacattaaatgctaatccgagaacttcaaaaataattgattctgctgataaaggaatatatgttttaaatcatgacgaaaaaacatggaaaagagtttttggtaataccgaagaagaaagaagacgtattcaacccggatatgcgaatatgtcaactgacggtaaattagtttctctgtcttcgagcaattttaaatttttaagtgataatgttgttaatgaccctgaaactgcagcaaaatatcagttaattggtgctgtcaaatatgaatttcctcgtgaatggttagctgataagcattatcatatgatggcatttatagcggatgaaacatctgattgggagacttttactcctcaaccaatgaaatactacgcagaaccattctttaactggtctaaaaaatctaacacacgttgttggataaacaactctgatagagctgtagtagtttatgctgatttaaaatacactaaagttatagaaaatattccggaaacatcaccagatagattagttcatgaatactgggatgatggtgattgcactatagtaatgccaaatgtcaaattcactggatttaaaaaatacgcatcaggaatgcttttctacaaagcctccggtgaaataatttcttactatgattttaactatcgtgtgagagatacagtagaaattatttggaagccaactgaagtatttttaaaagcatttttacaaaaccaagagcatgaaactccttggtcgcctgaagaagagcgtggattggctgaccctgatttaagaccattgattggcacaatgatgcctgattcttatttgttgcaggattcgaattttgaggcattttgcgaagcatatattcagtatctttctgatggatatggaactcagtataacaatttacgaaatttaattcgtaacaaatatccacgagaagagcatgcatgggaatatttgtggtcagagatatataaaagaaacatttatttaaatgctgacaaacgtgatgctgttgcaagatttttcgaatcacgtagctatgatttttattctactaaaggaattgaagcatcatacaaatttctttttaaagttctttataatgaagaagttgaaattgaaattgaatctggggctggtactgaatatgatataatcgttcaatctgattctttgactgaagacttagtaggacaaacgatttatacggcaacaggaagatgtaatgttacttatatagaaagaagctattctaatggtaaattgcaatggaccgtaactattcataatcttttgggacgattaattgctggtcaagaagttaaagcagaaagactccctagttttgaaggcgaaattattcgtggggtcaaaggaaaggatttgcttcaaaacaatatagactatattaatagaagtagatcatattatgtaatgaaaattaaatccaatttaccttcttcccgctggaaatctgacgttattcgttttgttcatccagtaggatttggatttatagcaattacacttttaacaatgtttattaatgttggtttaactcttaaacatacagagactataattaataaatacaaaaactataaatgggattctggattgcctactgaatatgctgatagagtagctaaattgactccaactggtgaaattgagcatgattcggtaacaggcgaagcaatttatgagcctggcccaatggctggtgtagaatatcctcttcctgatgactataatgctgaaaataataattcaatatttcaaggtcaattgccgtctgaacgacgtaaattaatgagtcctttatttgatgcatctggaacaacatttgcgcaatttagagatttagttaataaacgtctaaaagataatataggaaatccaagagaccctgaaaatccaacacaggttaaaatagatgaatgattcaagtgttatctatcgtgcgatagttacttcaaaatttagaacagaaaaaatgttgaatttttataattcaattggaagtggtccggataaaaacactatctttatcacatttggaagatcagaaccgtggtcatcaaatgaaaatgaggtgggctttgccccaccttatcctaccgattctgtattaggtgtaactgacatgtggactcatatgatgggaacagtaaaagttcttccatcaatgcttgatgctgttattcctcgcagagattggggagatactagatatccggatccatacacatttagaattaacgatattgtagtgtgtaactcagctccttacaacgctactgaatcaggcgcaggctggttagtatatcgttgtttagatgttcctgataccggaatgtgttcaatcgcatctttaactgataaggatgaatgccttaagttaggtggaaaatggactccttctgctaggtcaatgactcctcctgaaggtcgaggagatgctgaaggaacaattgaacctggggacggatatgtttgggaatatctatttgagattccgcctgatgtatctataaatagatgcacgaatgaatatatcgtggttccttggcctgaggaattaaaagaagacccgactagatggggatatgaagataatctcacttggcaacaagatgattttggattaatttaccgtgttaaggcaaatactatccgttttaaagcatatttagattcagtttattttcctgaagctgcattgccaggaaataaaggatttagacaaatatcaataattacgaatcctcttgaagctaaagctcatccaaatgacccaaacgttaaagctgaaaaggattattatgatccggaagatttaatgaggcattcgggcgaaatgatttatatggaaaataggccacctattattatggcaatggatcaaacagaagaaatcaatattctgtttacattttaaattaagggagcccatgggctccctttttctttataaatactataaactcataaggaaaccgctatgttcattcaagaaccaaagaaattgattgataccggcgaaattggtaacgcttctactggtgatatcttattcgacggtggtaataaaattaatagtgattttaacgcaatttataatgcgtttggcgatcaacgtaaaatggcagtagcaaatggcaccggagcagatggtcaaattatccatgctactggatattatcaaaaacactctattgcagagtatgcaactccagtaaaagttggcactaggcatgatattgatacctctaccgtaggtgttaaagttatcattgaaagaggcgaactcggcgattgtgttgaattcattaattctaacggatcaatatcagttactaatcctttgacaattcaagctattgattcaattaaaggtgtttcaggtaatttagtagtaactagcccatatagtaaagttactttacgctgtatttcatctgataattctacgtcggtttggaattattctattgaaagtatgtttggacaaaaggaatcaccagctgaaggtacatggaatatttctacatctggatcagttgatattccactatttcatcgcactgaatacaatatggctaaattactagttacatgccaatcggtagatggaagaaaaattaaaacagcagaaataaatattcttgtggatactgtcaattcagaggtaatttcttctgaatatgctgtcatgcgagttgggaatgaaaccgaagaagacgaaatcgctaatattgcatttagtattaaagaaaattacgtaacggcgactataagttcttcaactgtcggtatgagagcagcagttaaagttatcgctacgcagaaaatcggggtggctcaataatgaaacaaaatattaatatcggtaatgttgtagatgatggtaccggtgactacctgcgtaaaggtggtataaaaataaatgaaaactttgatgagctttattacgagctcggtgatggagacgttccatattcagccggtgcctggaaaacttatgatgcttcatctgggcaaacactaaaagctgaatggggaaaatcatacgctattaatacctcttctggaagagtgactataaatcttccaaaaggaacagttaatgattacaacaaggtaattagagctagagacgtatttgctacatggaacgttaatccagttacactagtagctgcttccggtgatacgattaaagggtctgcagtaccagttgaaattaatgttcaattcagtgatttagaactagtgtattgtgccccaggacgttgggaatatgtcaaaaataaacaaattgacaaaattaccagttcagacattagtaatgtagctcgcaaagaatttttagttgaagttcaaggacaaacggactttttagatgttttccgtggaactagttataatgtaaataacatcagagtaaaacatcgcggtaacgaattgtattacggtgatgtgtttagcgaaaacagcgattttggctctccgggcgaaaatgaaggagaactagttcctcttgatggatttaatattcgattaagacagccttgtaatattggtgacactgttcaaattgaaacatttatggatggtgtatcgcagtggagaagttcatatacaagacgtcaaattagattgttagattcaaaattaacgtcaaaaacttctttagaaggaagcatttacgttactgatttatcaacaatgaaatcaattccattttctgcttttggattaattccaggagaacctattaatcctaactctcttgaggttcgttttaacgggattttgcaggaattggctggcacagttggaatgccattatttcattgtgttggtgccgattcagacgatgaggtagaatgctctgttttaggtggaacttgggaacaatctcataccgattattcagttgaaactgatgaaaacggcataccggaaattttacatttcgatagagtatttgagcatggtgacattatcaatatcacctggtttaataatgatttgggtacattattaacaaaagatgagattattgatgaaactgataatctctatgtatctcaaggaccgggagtagacatttctggtgacgtaaatttaacggacttcgataaaattggttggccaaatgtagaagcagttcaatcttatcaacgtgaatttaatgctgtttcaaatattttcgatacgatttatcctatcggaactatatatgaaaatgctgttaatccaaataaccctgttacatatatgggattcggctcgtggaaattatttgggcaaggaaaagttttagttggatggaatgaagatatttcggaccctaactttgctctaaataacaacgatttagattcgggtggaaatccttcacatactgcaggtggaacaggtggttctacttctgttacattggaaaatgctaatcttcctgcaactgaaacagatgaagaagttctaatagttgatgaaaatggatcagtcattgttggtgggtgtcaatacgatccagatgaatccggtccaatttacactaaataccgtgaagctaaagcatctactaactctactcacactccgccaacatcaataactaacattcaaccatatattacagtttatcgttggataaggattgcataatgagtttacttaataataaagcgggagttatttcccgcttagccgattttcttggttttagacctaaagctggtaatatagatgtaatgaatcgtcaatcagttgggtcagtgacaatttctcaattagcgaaaggattttatgaaccaaacgtagaatcagctattaatgacgttcataatttttctataaaagacgttggtacaattattactaataaaactggtgtttctcctgagggtgtttctcaaactgattattggtcattttctggaactgtaacagacgattctcttcctccgggttctcctgttacggtattagtatttggtcttccagtttcagcaacaactggaatgacggcaattgagtttgttgcaaaagttcgtgttgcccttcaagaagctattgcgtcatttactgctatcaactcatataaagaccatccaacagatggtagtaaattagaagttacttatttagataatcaaaaacatgtattaagcacatattctacatatggaataactatttcgcaggaaattatttctgagtctaaacctggctacggtacatggaatttattaggcgcacaaactgtaactttagataatcagcagactcctacagtattttatcattttgagagaacagcatgagtaataatacatatcaacacgtttctaatgaatctcgttatgtaaaatttgatccaactggtacaaattttccggaagagattactgatgttcaggctgctatagcagccatttctcctgctggcgtaaatggagttcctgatgcatcgtcaacaacaaagggaattttatttcttgccactgaacaggaagttatagatggaactaataataccaaagcagttacaccagcaacgttggcaacaagattatcatatccaaacgcaactgaaactgtttacggattaacaagatattcaaccaatgatgaagccattgccggagttaataacgaatcttctataactccagctaaattttactgttgctcttaataatgcgtttgaaacacgagtttcaactgaatcctcgaatggtgttattaaaatttcatctctaccgcaagcattagctggtgcagatgatactactgcaatgactccattaaaaacacagcagttagctattaaattaattgcgcaaattgctccttctgaaaccacagctactgaatcagaccaaggtgttgttcaattagcaacagtagcacaggttcgtcagggaactttaagagaaggctatgcaatttctccttatacgtttatgaattcatctgctactgaagaatataaaggcgtaattaaattaggaacacagtcagaagttaactcgaataatgcttctgttgctgttactggtgcaactcttaatggtcgtggttctacaacgtcaatgagaggcgtagttaaattaactacaactgccggctcacagagtggaggtgatgcttcatcagcactagcttggaatgctgacgttatccatcaaagaggcggtcaaactattaatggaacactccgcattaataacacgcttacaatagcttcaggtggagcaaatattaccggaacagttaacatgaccggtggttatattcaaggtaagcgtgtcgtaacacaaaatgaaattgatagaactattcctgtcggagctattatgatgtgggccgctgatagtcttcctagtgatgcttggcgtttttgccacggtggaactgtttcagcgtcagattgtccattatatgcttctagaattggaacaagatatggcggaagttcatcaaatcctggattacctgatatgcgtggtctttttgttcgcggctctggtcgtggctctcacttaacaaatccaaatgttaatggtaatgaccaatttggtaaacctagattaggtgtaggttgtactggtggatatgttggtgaagtacagaaacagcagatgtcttatcataaacatgctggtggatttggtgagcatgatgattctggggcattcggtaatacccgtagatcaaattttgttggtacacgtaaaggacttgactgggataaccgttcatacttcaccaatgacggatatgaaattgacccagcatcacaacgaaattccaaatatacgttaaatcgccctgaattaattggaaatgaaacacgtccatggaacatttctttaaactacataattaaggtaaaagaatgacagatattgtactgaatgacttaccattcgttgacggccctcctgcagagggccagagccgcatttcctggattaaaaacggcgaagaaattttaggagctgatacacagtatggaagtgaaggttcaatgaatagacctacagtttccgtactaagaaatgttgaagttctcgataaaaacattggaatacttaaaacatctttagaaaccgcaaatagtgatattaaaaccatccagggcatcttagatgtatctggtgatattgaagctttagcgcaaataagtatcaataaaaaggatatttctgacctcaaaacgctaaccagtgaacatacagaaatattaaatggaactaatagtactgttgacaacattcttgctgatattggtccatttaactccgaggccaactctgtatacagaacaatcagaaatgatttactgtggataaagcgtgaacttggacaatacactggtcaagatattaatggtcttcctgttgtaggaaatcctagtagtggaatgaagcatcgcattattaataatactgatgtcattacttcacagggaatacgtttaagcgaattagaaacaaaatttattgaatctgatgtaggttctttgactattgaagttggtaatcttcgcgaagagcttggaccgaaaccgccgtctttttcacaaactgtttatagtcgtttaaatgaaattgacactaaacagacaacagttgagtctgatattagtgctattaagacctcaataggatatccaggaaataattcgattattacgagtgttaatacaaacactgataatattgcatctattaatttagagctaaatcaaagtggaggtattaaacagcgtttaaccgttattgaaacttctattggttcagatgatattccttcgagtattaaaggccaaatcaaagataatacaacttcaatcgaatctttaaatggaatcgtcggtgaaaacacttcatctggtttaagagcgaatgtttcgtggttaaaccaaattgttggaactgattctagcggtggacaaccttctcctcctgggtctcttttaaaccgagtttctacaattgaaacttctgtttcaggcttgaataacgatgttcaaaacctacaagtagagattggtaataacagcacaggaattaaagggcaagttgtagcgttaaatactttagtaaatggaactaacccaaatggttcaactgttgaagaacgcggattaaccaattcaataaaagctaacgaaaccaacattgcatcagttacacaagaagtgaatacagctaaaggcaatatatcttctttacaagacgatgttcaagctctccaagaagccggttatattcctgaagctccaaaagatggccaagcttacgttcgtaaagacggcgaatgggtattactttctacctttttatcaccagcataacatggggccgcaaggccccaaaggattttaaatgtcaggatataattctcagaatccaaaggaactcaaagatgtcattctaagacgtttaggggctccaattattaatgttgagttaacacccgatcaaatttacgattgtatccagcgtgccctagaattatacggtgaataccattttgatggactcaataaaggttttcacgtattttacgtaggggacgatgaagaaaagtataaaactggagtcttcgatttaagaggttctaacgtatttgcagtaacccgcattttacgcacaaatattgggtcaataacgtcaatggatggaaacgctacatatccgtggtttactgactttcttttaggaatggctggtattaatggcggaatgggaacgtcttgtaatagattttatggaccaaatgcctttggtgccgatttggggtattttactcaacttaccagttatatgggaatgatgcaagatatgctctctcctattccagacttttggtttaattcagcaaatgaacaactcaaagtcatgggaaacttccaaaaatatgatttaattatcatagaaagctggactaaatcatacattgatactaataaaatggttggaaatacagtaggatatggaacagtcggtccacaagatagctggtcattatctgaacgttataataacccagaccacaatttagtaggtcgtgttgttggtcaagacccaaatgttaagcaaggtgcttacaataatcgttgggtgaaagactatgcaacagctttagctaaagaattgaatggtcaaattttagcacgccaccaaggtatgatgcttcctggcggtgttacaattgatgggcagcgcttaatagaagaagctcgattagaaaaagaagcactgcgcgaagaattatacttacttgaccctccatttggaattttggtaggttaatatggctacttatgataaaaatctttttgctaaattggaaaaccgcacaggttattctcagaccaatgaaactgaaatattaaatccttatgtaaatttcaatcattataaaaacagccaaatattagctgatgtattagtagctgaaagcattcaaatgcgaggggtagaatgctattatgttccaagagagtatgtttcccctgatttggtattcggcgaagacttaaaaaataaatttactaaagcttggaaatttgctgcgtatttaaattcatttgaaggatatgaaggagctaaatcgttctttagtaactttggtatgcaagtacaagacgaagtgactttatctattaacccaaatttatttaagcatcaagttaatggaaaagaaccgaaagaaggcgatttgatatattttcctatggataacagcttatttgaaatcaactgggttgaaccatatgacccattttatcaattaggccaaaacgctattcgtaaaattacagcaggtaaattcatttattctggagaagaaattaatccagttctacagaaaaatgaaggaattaacattccagaatttagtgaattagaactaaatcctgttcgcaatcttaacggtattcatgatattaatattgatcagtatgctgaagtagatcaaattaattctgaagctaaagaatatgttgaaccatatgttgttgtcaataacagaggcaaatcttttgaatctagcccatttgataatgatttcatggattaataaatattataaactaattaaagcccagattaggagaaatcatgtttggttatttttataattcgtcttttagacgatatgctaccttgatgggcgatttgttttcaaatatccaaatcaaacgtcagttagaatctggtgataagtttatacgtgttcctattacgtatgcatcaaaggaacacttcatgatgaaattgaataaatggacatcgataaattcacaagaagatgtagctaaagttgaaactattctacctcgtataaatttacatttagttgattttagctataatgctccatttaaaacaaacattttaaatcagaatttactgcaaaaaggtgcaacttctgtagtatcgcagtataatccatctcctattaaaatgatttatgaattgagtatctttactcgctacgaagatgatatgtttcaaatagttgagcagattcttccatattttcaacctcattttaatacaactatgtacgagcagtttggaaatgatattccatttaaaagggatatcaaaattgtactgatgtctgctgctatagacgaagctatagatggggataatttatctcgtcgtagaattgaatggtcattaacatttgaagtaaatggatggatgtatcctccggtagatgatgcagaaggattaattcgtactacttatacagattttcatgctaatacaagagatttgcctgatggcgaaggtgtttttgaatctgttgataatgaagttgttcctcgagatattgacccagaagactgggatggaacagtaaaacaaactttcactagtaatgtaaatagaccaacaccgccagaacctcctggcccaagaacatagaggttattatggaaggtcttgatataaacaaacttttagatatttctgacctccccggaatcgacggggaggaaattaaagtatatgaacctctgcaattagtagaagttaaaagcaatccacaaaaccgtactccagatttagaagatgattacggagtagttcgtcgaaatatgcattttcaacaacaaatgctaatggacgcggccaagatttttcttgagacagcaaagaatgctgattctcctcgtcacatggaagtatttgcaactcttatggggcaaatgactacgacgaacagagaaatactgaagcttcataaagatatgaaagacattacatctgagcaggttggcaccaaaggcgctgttcctacaggtcaaatgaatattcagaatgcgacagtattcatgggttcaccaacagaattaatggacgaaattggtgatgcttacgaggctcaagaagctcgtgagaaggtgataaatggaacaaccgattaatgcattaaatgatttccatccattaaatgaagctggaaaaattttaataaaacacccaagcttagcagaaagaaaagatgaagatggaattcattggataaaatctcagtgggatggaaaatggtatcctgaaaaattcagtgattaccttcgtctacataaaatagtaaaaattccaaacaactctgataagcctgaattatttcaaacttataaagataagaataataaaagatctcggtatatgggtcttcctaacttgaaacgagctaatattaaaacacaatggactcgtgaaatggttgaggagtggaaaaaatgccgagacgatattgtttattttgcagaaacatactgcgctattactcatattgactatggtgtcataaaggttcaattacgtgactatcagcgtgatatgctcaaaataatgtcatctaaacgtatgactgtttgtaatttatcgcgccagcttggtaaaacaactgtagtagctatttttcttgcacactttgtatgttttaacaaggataaagctgtaggtattcttgcgcacaaaggctcaatgtctgcggaagttttagatcgtactaaacaagcaattgaactgcttcctgactttttgcagccaggaattgttgaatggaataaagggtctattgaacttgataatggttcctcaatcggagcctatgcttcctctcctgacgcagttcgtggtaactcgttcgcaatgatttatattgacgaatgcgcatttattccaaacttccatgattcctggcttgctattcagccagtaatttcatctggtcgtcgttcgaaaattattattactacgactcctaatggattaaatcatttttatgatatttggactgcagccgttgaaggtaaatctggatttgaaccatatactgctatttggaattcagttaaagaacgtctttataacgatgaagatatttttgacgatggatggcaatggagcatacaaaccattaatggttctactttagctcaatttcgtcaagaacacaccgcagcgtttgaagggacttctggtacattaatttcaggaatgaaattagctgttatggatttcattgaagtaactccagatgatcatggttttcatcgatttaaaagtcctgaaccagatagaaaatatattgcaactctagactgctcagaaggtcgtgggcaagattaccacgctttacatattattgatgttactgatgatgtgtgggaacaagttggtgttttacactcaaacactatttctcatttaattctacctgacatcgttatgcgttatttagtagaatataatgaatgcccagtttatattgaattaaatagtactggtgtgtcagttgcgaaatcactttacatggatttagaatacgaaggcgttatttgcgattcatatactgatttaggaatgaagcaaactaaacgaacgaaagcagtaggatgctctacattaaaagaccttattgaaaaagataagcttattattcatcaccgcgcaactattcaagagtttagaacgtttagtgaaaaaggcgtgtcttgggcggctgaagaaggttatcacgacgatttagtaatgtctttagtaatttttggatggttatcaacacaatcaaaatttattgattatgctgacaaagatgacatgcgactagcatctgaagtgttttcaaaagagcttcaagatatgggtgatgaatacgctccagttatatttgttgattcggttcattctgctgagtatgttccagtatctcatggtatgtcaatggtataaatatattaaagcatattaaagaggattaaaaatgactttattatctccgggcattgagctcaaagaaactacggttcaaagcaccgtggttaataactctactggtacagcagctttggccggtaaattccagtggggtcctgcttttcaaattaaacaggttacaaatgaagtagatttagttaatacttttggtcaacctacagctgaaactgctgactattttatgtctgcaatgaatttcttacaatacggaaatgatttgcgagttgtgcgtgctgtcgatagagataccgctaaaaactcatctccgattgccggtaatattgaatacactatttctaccccaggtagtaactacgcggttggagataaaatcacggttaagtatgtttcagaagacattgaaacagaatgtaaagttaccgaagtagatgctgatggaaaaattaagaaaattaatattcctactgcaaaaattatcgctaaagcgaaagaagtcggtgaatatccaacattaggttctaactggaccgcggaaatttcttcgtcttcctctggtttagctgcagtaataactcttggaaaaattattactgattctggtattttattagctgaaattgaaaatgccgaagctgctatgacagctgttgactttcaagcaaatctcgaaaaatatggaattccaggagtagtagctctttatccaggcgagttgggcgataaaatcgaaattgaaatcgtatctaaagctgactacgcaaaaggggcttctgcattacttccaatttatccaggtggcggaacacgcgcatctactgccaaagcagtgtttggatatggaccacaaactgattcacaatacgctattatagttcgtcgcaatgatgctattgttcaaagcgttgttctttcaacgaagcgtggtgaaaaagatatttacgatagtaacatctatattgatgactttttcgcaaaaggtggttcagaatatattttcgcaactgcacaaaactggccagaaggcttctctggaattttaactctgtctggtggattatcgtcaaatgctgaagtaacagcaggagatttgatggaagcctgggacttctttgctgaccgtgaatctgttgacgttcagttgtttattgcgggttcttgcgccggcgaatctttagaaacagcatctactgtccaaaaacacgtcgtttcaattggtgatgctcgccaagattgcttagtactgtgctcaccaccgcgtgaaactgtagttggaattcctgtaactcgtgctgttgataacttagtcaattggagaactgcagcaggttcatacactgataacaactttaatatcagttcaacctatgcagcaatcgatggtaactacaagtatcagtatgacaaatataatgatgtgaatcgttgggttccattagcagctgatattgctggtttatgcgcgagaacagataacgtttctcagacttggatgtctccagctggttataatcgtggtcagattcttaacgttattaaacttgctattgaaactcgccaggcgcagcgcgaccgtttataccaagaagctatcaacccagtaactggtacaggtggtgatggttacgtattgtatggtgataaaacagctacttctgttccttctccatttgatcgtattaacgttcgtcgtctgtttaatatgttaaaaacgaatatcggacgtagttcaaaatatcgtttgttcgaattaaacaacgcgtttactcgttcatcattccgcacagaaactgcccagtacttacagggaattaaagctctcggtggaatttatgaatatcgtgtagtttgcgatacaacaaataacactccgtcagtaattgatagaaatgagtttgttgcaacattctacatccaaccggcgcgcagtataaattatattactttgaatttcgtcgcaactgctactggtgcagacttcgatgagttaactggtcttgcaggttaatacggtgcattctaaaggcctgtttcggcaggccatataaatacactatatccttaattctttaattctatatgccctaggttaaacatagggatataaatactacagaggctaatatgtttgtagatgatgtaacacgagcgtttgaatctggtgattttgctcgacctaacttattccaagtagaaatttcttatcttggacaaaattttacgttccaatgtaaagccactgctttaccagctggtattgtagaaaaaattccagtcggatttatgaaccgtaaaattaacgtagcaggcgatcgtacattcgatgactggactgttacagtaatgaacgatgaggcacatgatgctcgccagaagttcgttgattggcaaagcattgctgcaggacaaggaaacgaaattactggtggaaaacctgcagagtataaaaagagcgctatcgttcgtcaatatgctcgtgacgctaaaacagtaacaaaagaaattgaaattaaaggtctatggcctactaacgtgggtgaacttcaattagattgggattcaaacaatgaaattcaaacctttgaagtaactcttgctctcgattattgggaataaaatgaatggggagaaatccccatcctgcttaaagcagagaagtccattataaatataactataattcccatttggagaatacaatgaaatttaatgtattaagtttgtttgctccatgggctaaaatggacgaacgaaattttaaagaccaagaaaaagaagatcttgtttccattacagccccaaagcttgatgatggagcaagagaatttgaagtaagctcgaatgaagctgcttctccttataatgctgcattccaaacaatttttggttcacatgaaccaggaatgaaaactactcgtgagcttattgatacatatcgtaatctcatgaataactatgaagtcgataatgcagtttcagaaatcgtttcagacgctatcgtctacgaggatgatactgaagtcgtagcgttaaatttggataaatctaaatttagcccaaaaattaaaaatatgatgttagatgaatttagtgatatattaaatcatctatcgtttcaacgaaaaggttctgatcattttagacgttggtatgtcgattcaagaattttctttcataaaattattgatccaaaacgtccaaaagaaggcataaaggaattacgtagattagaccctcgtcaagttcagtatgttcgtgaaattataacagaaactgaagctggcacaaaaatagttaaaggttacaaagaatattttatatatgatactgcccatgagtcatatgcatgtgatggtagaatgtatgaagctggcacaaaaataaaaattcctaaagctgccgtcgtttatgcccattctggattagtcgattgttgcggtaaaaatatcatcgggtatttgcatcgtgctgttaaacctgctaaccaattaaaattattagaagatgctgtagtcatttatcgtattactcgtgctcctgaccgccgtgtttggtatgtagacacaggtaatatgcctgctcgtaaagctgctgagcacatgcaacatgttatgaacacgatgaaaaaccgtgtagtatatgatgcatcaaccggtaaaataaaaaatcaacagcataatatgtctatgaccgaagactattggttgcagcgccgtgatggtaaagctgtgacagaagttgatactcttcctggtgctgataatactggcaatatggaagatattcgttggtttagacaagctctttatatggcattacgtgttcctctttcacgcattccgcaagaccaacaaggcggtgtaatgtttgattctggaactagcattacacgtgatgaattaacgtttgctaaatttattcgtgagcttcagcataaatttgaagaagttttcctagatccgcttaaaacaaatctgttgcttaaaggtataatcacagaagatgagtggaatgatgaaataaataatattaagatagaatttcatcgggatagctactttactgaactcaaagaagcagaaattttggaacgaagaattaatatgctaaccatggcagaaccatttattggtaaatatatttctcacagaactgctatgaaagatattttgcagatgactgatgaagaaatagaacaagaagccaagcaaattgaagaagagtctaaagaggctcgtttccaagaccccgaccaagaacaagaggatttttaatggaaggtttaattgaagctattaaatcaaacgacctcgtagccgctcgtaaattctttgctgaagccatggctgcaagaacgattgatttaattaaagaagaaaaaatcgctatcgctcgtaatttcttaatcgaaggtgaagaacctgatgatgaggatgacgaagacgaggatgatgacgaagatagcgatgataaagacgacaaaaaagacaaagactctgacgaagacgaggatgatgaataatgcttctgatccctgaaactcatgaattagttctcgagaatgtcgaagcacttattcctgaagcacagggtcgctttgacgaattgtcttctgctttaaataaagacgatataaatacaattgtcgagaatatgcttgatgatgaaactgatttagcggttgcattagcttctattaatgaaaatatgccgttaaatgaatttatcgttaaacatgtttccgcccgtggtgaaattactcgcactaaagaccgcaaaacgcgtgaacgtaatgcatttcaaaccactgggctgtctaaagcaaaacgtagacaaattgctcgtaaagctaccaaaacgaagattgccaatccagcaggtcaatctcgtgctcagcgtaagcgtaaaaaagctcttaaacgccgtaaagcattaggattaagctaatgaatgaaccccaattactaattgaaacttggggtcaacctggcgaaattattgatggcgtgccaatgcttgaatctcatgatggaaaagacttaggtttaaaaccgggtttatacatcgaaggaatattcatgcaagcggaagtcgtcaatagaaataaacgtctttatccaaaacgtatattagaaaaagcggtaaaagactatattaatgagcaagttttaactaaacaagctctcggagaattaaatcatcctccacgcgctaatgttgacccgatgcaagccgctatcattatagaagatatgtggtggaaaggaaatgacgtatacggacgagctcgtgttattgaaggtgaccatggtcctggagataaattagcagctaatattcgtgccggatggattccaggagtttcttctcgtggattaggttcattgactgacacaaataaaggttatcgtatcgtaaacgaaggattcaaattaactgtaggtgttgatgcagtatggggtccaagtgctccagatgcatgggtaactcctaaggaaattaccgaatcacaaacggcggaagccgatacaagtgccgatgacgcctatatggctctcgcagaggccatgaaaaaagcgttataaatattattatctaaacaacaggactacaaaatgcttaaagaacaactgattgccgaagcgcagaaaattgatgcttccgttgctcttgatagtattttcgaatcagttaatatttctccggaagcaaaagaaactttcggcactgtattcgaagctaccgtcaagcagcacgccgttaaattagctgaatctcatatcgctaaaattgctgaaaaagcagaagaagaagtagaaaaaaaataaagaagaagccgaagaaaaagctgagaagaaaatcgctgagcaagcttctaaattcattgaccatcttgcaaaagaatggctcgctgaaaataaattagcagttgataaagcatcaaagccgaactgtttgaatccatgcttggtggattgaaagagctcttcgttgaacacaacgttgttgttccagaagaatcagttgatgttgtagctgaaatggaagaagagctgcaagaacataaagaagaatcagctcgtctgttcgaagaactcaataagcgtgacgcatatatcaattatgtgcagcgtgaagtggcattgagcgaaagtactaaagatctgactgagtctcaaaaagaaaaaagtctctgctctggtcgaaggtatggattattcagatgcattctcaagtaaattgagtgcaatcgtagaaatggtgaagaaatctaataaagatgaaagcactattactgagagtataaatactcctgatactgaagcagccggactgaatttcgtcactgaagctgtagaagataaatctgcatctggtgcagaagatattgtaagtgtatatgcgaaagtcgcatctcgtttctaattttaaaggttaacacaaatgactatcaaaactaaagctgaacttttgaacaaatggaagccattactggaaggtgaaggtttaccggaaattgctaatagcaaacaagcgattatcgctaaaatctttgaaaaccaggaaaaagatttccagacagctccggaatataaagacgaaaaaattgctcaggcatttggttctttcttaacagaagctgaaatcggtggtgaccacggttacaatgctaccaacatcgctgcaggtcagacttctggcgcagtaactcagattggcccggctgttatgggtatggtacgtcgtgctattcctaacctgattgctttcgatatttgcggtgttcagccgatgaacagcccgactggccaggtattcgcactgcgtgcagtatatggtaaagacccaatcgcttccgatgctaaagaagcattccacccaatgtatggtccagatgcaatgttctctggtcagggtgctgctaagaaattcccagctcttgctgctagcacacaaaccgttgtaggtgatatctatactcacttcttccaggaaactggtactgtgtatctgcaagcttccgctgtagtaacaatcgatgctggtgcgactgatgctgctaaattagatgccgaagttaagaaacaaatggaagctggtgtactggtagaaatcgctgaaggtatggctacttctatcgctgaactccaggaaggttttaacggttctaccgataacccatggaatgaaatgggcttccgtatcgataagcaagttatcgaagctaaatctcgtcagctgaaagctgcttactctattgaattagcacaagacctccgcgctgttcacggtatggatgctgatgctgaactgtctggtattctggctacagaaattatgctggaaatcaaccgcgaagttgttgattggattaactactcagcgcagattggtaaatctggtatgaccctgactccgggttctaaagctggtgtatttgacttccaggacccaatcgatattcgtggtgctcgctgggcaggtgaatcctttaaagctctgttgttccagattgacaaagaagcagttgaaattgctcgtcagaccggtcgtggtgaaggtaacttcattatcgcttcccgtaacgtagttaacgttctggcttcagttgatactggcatttcttatgctgcacaaggtctggctaccggctttaacactgatactaccaagtcagtatttgctggtgttctgggtggtaaataccgtgtatatatcgaccagtatgctaaacaggattatttcactgtaggttataaaggtccgaacgaaatggatgctggtatttactatgctccatatgtagctctgactccgctgcgtggttccgatccgaagaacttccaaccggtaatgggattcaaaactcgttacggtatcggtatcaacccatttgcagaatccgctgctcaggctccggcttctcgcatccagagcggtatgccttctattctgaatagccttggtaaaaacgcttactttagacgtgtatatgttaaaggtatctaatctctaacgatagaaacacaattttagggaaccttcgggttccctttttctattttatacgatagcaatcaggcatatcatccgcatttatccaattgcgaatagttttaggactaactttaaaatgctccgctgcgtaatcaggattatcaaatttaacgccctttatacatattggaataaattttttaataccaccaagtttttcagaaatagctttacgatgtgaaatcgatataggtttattttttcgtggatgaacatgtgttttataatattcattgcgccctttaactcgcttcgcaatagtttcatcagattgcttaacgcctgtttttgcctttgatatttttcgtttagcttccacagtcattccttcttttgttcgtattgataacatattacgatatgaaggatcttgcaaatgaactataactggatttcctctgccaccaatagcagcattataggtatcagttctcataacgaattcctcattgactagtaaagcttccattttatacatctcctcagatgaggagaaagaataaagaatttctttttttaaagttatgaataccatatttttttgatggattttttgatgtttacgccagaacccatataaccatcgttttcgtcaagagtagcatgagctccgatgtaaatttttccattgatgatattagtaatttgatatattaaatatttcattttaaacatcgctccgtttgtatatgaatataatatcatattactttggtcttgtaaataactttataaatagtattatatttcaacaaggaaaatacaatggctaaaatcaacgaacttctgcgcgaatcaaccacaacgaatagcaactcaatcggtcgcccaaatctcgttgctttgactcgcgctaccactaaattaatatattctgacattgtagcaacgcaaagaactaatcaacctgttgctgctttttatggtatcaaataccttaacccagacaatgaatttacatttaaaactggtgctacttatgctggcgaagctggatatgtagaccgagaacaaatcacagaattaacagaagagtctaaattaactctcaataaaggcgatttattcaaatataataatatcgtttataaagtattagaagatacaccatttgctgatattgaagaaagcgatttagaattggctcttcagattgcaattgttcttttaaaggttcgtctattttctgacgcagcgtcaacaagcaaatttgaaagctctgatagtgaaattgcggatgctagattccagattaataaatggcaaaccgcagttaaatctcgcaaacttaaaactggtatcacagttgaattagcacaagatttagaagcaaatggattcgatgctcctaatttcttggaagatttgcttgcaactgaaatggcagatgaaatcaataaagatattctgcagtctttgattacagtatcaaaacgttataaagttacaggaattactgatactggattcattgatttgagttatgcatctgctcctgaagcaggtcgttcattataccgaatggtatgtgaaatggtttcgcatatccaaaaagaatcaacttatacggcaacgttctgtgtagcttctgctcgtgccgctgcgattcttgctgcttcaggttggttaaaacataaaccagaagatgacaaatatctttcacaaaatgcctacgggttcttagctaatggtttaccgctttattgcgatactaacagcccattagattatgtaatcgttggtgtagtagaaaatatcggtgaaaaagaaattgttggatcaattttctatgctccatatacagaaggtctcgacttagatgaccctgaacatgttggcgcatttaaagttgtagtcgatccagaaagcttgcaaccgtctatcggtttattagttagatatgctttatctgcaaatccttacaccgtagcaaaagatgaaaaagaagcaagagtaattgatggtggagacatggataaaatggcgggtcgttcagatttgtctgttttattaggtgttaagctaccaaaaattatcgttgatgaataaaacaaagggacctttcggtccctttttatttagctcaccaattcaatccaagccggacgaagtacatcttgtaccattttaactaattcctttttaatcaaagaaggattatctgcttgagttagagtaataccttcacgagaagtttcttccaaaatatcttgaacagttagtcccatcacctttccaaaatcctttggaccaatttcaccaattttagaaataacgttatttactcggtttagtgtaacgtaacaagctaaaatccccaccaatttgttatcagcttctgacagttcaactttagctttaataggcttatcagactttttcttttcactaaatttagaattcttacatttgatggctacacgattgcgattaggcagccaagaaggataacaaggtttcaatacatatccttcagcggtaaatacttcgcctttggcttcggcattccagacgcatttatttgcatcaactaatccagcatggtctactgtaaaattataatcttggacgacagaatctaaatcatttggcaatttaataagctcttcaaatttaccgcgacctaaaagtggagccattttaaatttaaatgtattgcagaatgattccatcatataatcgtcgacataagtcacatcgccactttctgtagtgacaataatgtcaaatacataaaaatctttatcaccataatcgacattcttctgaatgccaggtccagcgaattcgccaaagacttgataagatacaaccgctgaggtttccataatatcttgtactgctttaatggaatcagcataattctttaaaataatttcatacccaaagaaatcttcagcaggaagaataggaccagtacgtttagcgcaagttactttatcacgctcaataatcaatgagaaatttgtgccgtgaatcttttcacgagctacccattcgccgccagtcaatcccaggctataaagtttttcaataaatttagagttgtaatgattttcaagactgctatactttttaaacataattaatcctcaaaatgtaatttctaaccaatcaccatcacgctgatcactattgactttaaaattaaatccttcttttctcagccaatcaccaatttcttcagtaatcaatttatcgcgagcagtacaataataactaaaatatgttttaccttgttcagctgctttattagcaagttctgaaaaatctttaataaaacactctagcttaaactgtttacttttgaatgctttttcgcgtaattgattagcaaaagattcattttcataaagatcatactgttccatttttcacctttttattaatatgtctttttctatagacaactttttctcgagtctcaaatttattcttagcagtcatagctcgagcccataatacagccacttctttcgcctgtaagtttaattcacgagcaatttcaatgaatgactttccagactcatgaagagtaaacaccacaacctcagttctcataatcaatctcatgttatcgagttggtgccattatatacaccattttctgattgtgttttgtgtgctttcaaaatgaaaaaaggggccgaagccccttatgattatggataggtatagatgataccagtttctaaagcagttttgtgaatgatgtatccattacgcgattcttgaacatcaacttctggataatctttcatcattttctgaagagtgtaacgatgcaagtagtacttactatctggatcatcagttttccaatctttaccttcttcggtcattttttggatttcatccataacccaccaaccacaccagatgtaagctgaagtacgatgtggaagaggatgaacataaggtaattcaccttctggttctggagcaactttatcagttacctgaacttgaccttctgctgtaatagttttgctatcatagtcatctgcagtaacgacggcagtcacttcaatagtttgacttccaacagatgaagtatcaacggtatatacattagttgacccttctacaggagaagaatctttcttccatgaatacgcaatttgcgcttcttctggagcatcagtgacattagcagtaaatgtagccgaagcatcttgttgaacgttaatagaaggaggagtcaatgtaacctgtggattcattgtcttcttattaactgttaatgatacttcattagaagtaacttcctttgcatcataatctgtcgcggttacttgagccacacacttaattgttttaactccgcttgtggtaggagtgtaattgaatgtagtagaagttgcttcgcctacaggagaaccgtcaacgtgccattgatacgtagcagatgcgcctggtggttgagaagctaaggcagcagtaaattgaactggggttccaattactccagctgaaggactatcgggagttactgccaaggtagtcgtctgtgtcttattttgaactgtgatagttgtagtagcttctgctgtttcagcttcagcttctggaactgtatttgttgcaactactttaatagtcttttgtccagcaggtccttttaatacataatcaaaagttgctgctgatccttcttggggagcatcatctacactccaagcatatgtaataggtccatctccagtttgaccactgggtgtagcagtaaactgctgagtctgatctataactccagtaggtgttttaggagttatatcaactgtaaaagacataagttatccttattttaatgttacgaaagaagaattgcgtgtttcacgaattaaaactgatccgtcacggttaatgtaataaattaagctaaataaagtttggtgtgctgatgcatgctcaaaactagttgggtgagatttccaatccggagtttcagcaatccattgataaatccaccaaggaacagtgcagaatcctggattttttccaatcagctgaagatttgggctaaagttttccggaagagtaaatacagacggcttttcagattcaataatctcagttacagcctgttcaaatttttcttcaacaaaaggagtatcttcaatcaaaacatcggtattttcaggaattttatccttttctactacttcaattttaatgtcagatttaaccggagaatcaatcagaagtgctgcttctggattgacttcttcatcgtcatattttaatccctctgcggcatcagcagcatcaattaagtctttaatagataacccatcagtctctggcataggttcactagcaagcttctggagggcttcttcaatatcaacaacgatattatcaaaagatttattctttttgacctttataccaaactgttcagcatattcagctaatttagctttagcttctttattatcatcaagagccttcagctctgcaatataatctttatctatcataatatttcctcagtataaatatagatatatttattacatggtatttagacatgactgacattaaagtacatttttatgattttagtcacgtgagaattgattgtgaagaaagtacatttcatgaactccgtgatttctttagctttgaagctgatgggtatcgttttaatccgaaatacaaatatggccactgggatggacgaatccgtcttttagattataatcgtcttcttccattcggcttagtcgggcaaattaaaaagttctgtgataactttggctataaagcctggattgacccgcaaattaatgaaaaagaagaattatcaagaaaagattttgatgaatggctttctaaattagaaatctattcaggaaataaaagaattgaaccacactggtatcaaaaagatgcagtgttcgaaggattagttaatcgtcgtagaattcttaatcttccaacatccgctggtaaatcgttaattcaagctctgcttgctcggtattatttggaaaattatgaaggtaaaattcttatcattgttccaacaactgctctgacaactcagatggctgatgactttgttgactatcgtttattcagtcatgcaatgataaagaaaatcggcggtggagcatcaaaagatgataaatataaaaatgatgcaccagtcgttgttggtacatggcaaactgtagtaaaacaaccgaaagaatggttctcacagtttggaatgatgatgaatgatgaatgccatcttgctacaggaaaaagtatttcatctatcatatcaggtttaaataactgcatgttcaaatttggtctatctggttcattacgtgatggcaaagccaatatcatgcagtatgttggaatgtttggtgaaatatttaagccagtaacgacttctaagttaatggaagatggacaagtaactgagctaaaaattaatagtatttttcttcgctatcccgatgagttcactactaaattaaagggaaaaacttatcaagaagaaataaaaattattactggactcagtaaaagaaataaatggatcgctaaattagctattaagcttgcacaaaaagatgaaaacgcttttgtcatgtttaaacacgtatcgcacggtaaagctattttcgatttaattaaaaatgaatacgataaagtttattacgtatcaggggaagttgataccgaaacccgcaatataatgaaaaccttagctgaaaacggtaaaggaataattatagtagctagttatggtgtattttctactggtatttcagttaaaaatctgcatcacgttgttttagcacacggtgttaaatctaaaattattgtattgcaaacaataggtcgcgtattacgtaagcatggttctaaaacaatcgcaacagtctgggacctcatcgatgattgtggtgttaagccaaaatctgctaatacgaaaaagaaatatgttcatttgaactatcttttaaaacacggcattgatcgtattcagcgctacgcagatgaaaaatttaattacgtaatgaaaacagttaatttataagggcttcggccctttggagaaaaagatgttactagaatttaaacaatttctttatgaagcttctattgatgaatttatgggtaaaattgcctcttgtcaaacgatagaaggtctagaagaacttgaagcttattataagaaaagagttaaagaaactgaattaaaagatactgatgacatctcagtcagagatgctttggcaggaaaaagagctgaattagaagattcagacgatgaagtagaagaaagttttttaaattaaaaaaggcccaaccaaaaaggaagggccaaaactatagactaaaggtcacactatagcaaaagttgtgtttcatttaattgttcttccgaactttctgaaactggtagttctttaatgtaattataacaaggcccaggatgtacaggacctttgtctgtttcaacaaccaatgcagaatcgattggagttttacagacaacgcaaatcttatctgacatgattgtctcctctaaattatatatctatttatataactctcatatgcatatcaatgcccatatctttagaataaaaatactcatcaagatacccggcaaattttcctttaatataaagtacatcttcaccgcatgggtggtcggccaggatacgaatatcctgacgcttgagattatactttttcattaagaattgaatttccgtttcgaattcttcttcataattaaaagcatcatcaatgctatatctcattattttccagcctcaaatgcccgcatgtcttgaatatgcttaatagcaaatccgcgtgatttgatagcatcaagagctccactacagaaatctaataaaatcccccaatactgcagcaaggtatcaacctttaaaacatccttatcagctgatagaactgttttcatttctgatttctcataacggtccatactaaattcatcaccatctcctcgtcccgagtagtagtctaatttagctttaagagcaacttttttctgtgcatcaattctaagcatttcctttttaatacttgaatgcttattaagccatttactatataacatcacattattagctgcttcatactgcaatttagtcgaatctataaacacatctttcttcaattcttcttgaagatcttctaatctcatattgttctctattcaattgttattggatggacttagattcattataccacgtttatacgtgaagcattatactctgttactggaagccagttgtagttttatctgctcaatatcatcagggttatcgatgactgaaaagcgtatttctactatcagagtataatcatcataaactggtattacattaactgctaatttatcaatacgtggctcgtagtttcttactgcgctttcaatgttacgctcaacagtatcagcagtaagaggagtcatattctcaaaaagctgatcagataaatcgcatccaaactctgggtcaaatggccttgaccctttcctggttgtaataattcctaaaaggctatttttaattgaccttaatccaagagatctggaaacgtctttgtcccaatccattttcatttctgggtcaatgtcagaataaagcttattaatatttgccattatagtaactcaaagaactctttgaggcctcttattacatgagcatgggtttttccacactctggacatttaattggaacagccaaataaacggtaggctttaaaagcatatcttttatagctacaatatctgactctgtgatgatagaatataaatcttccagttctttttcatttaagtcttcaactggaatgctttccccgttagcgtgaatcgtttctatgcatgatactatcatgtgggctatatttttatcatcaaaaattttagggtatcggaatttaattttaatgtcacccagtgtataccagaggtcttctggtgcatctatttgtgtatgtaatagatttatatgggttggtatttcagttccacaggtgcacttccaggagttttcgtgattaacttcgccgagagaatgtgcccataaatgaatcaacagtagttctgattcttggcggtttaaatcttttgcatttgtacagtctttaattagttttttaacgatctcttctactgaaccgttctttttagcagtaataagttctagatattctttaagagtaaatgcgcgacagttgattattttagaaccaactctcacatcaaatttgtattcatacatatttagctcctttatttatcatatttataaatagaataaaaggagcatctatggcaaacattattcgttgtaaattaccagatggtgttcatcgttttaaaccatttacggtagaagattatcgagattttttgttagttcgaaacgatatagaacatcggtcaccacaagaacaaaaagaaataattactgatttaattgatgattattttggagactatccgaagacttggcaaccatttatatttttgcaggtatttgtagggtcaataggtaaaactaaagtaccggtcacatttgtatgtccaaaatgtaaaaaagaaaagacagttccatttgaaatatatcaaaaagaattaaaggaacctgtttttgatgtagctaatgttaaaattaaattaaagtttccttctgagttttatgaaaataaagcaaagatgattactgaaaatattcattctgttcaagtagatgaaatatggtatgattggaaggaaattagtgaatcaagccaaatagaacttgttgatgccatcgagatagaaacattagaaaaaattctcgatgcaatgaatcctattaatttaactctacatatgtcatgctgtaataagtacattaaaaaatacactgatatagtagacgtgtttaagctattagttaacccagatgagatatttactttttatcaaattaatcacacactcgtaaaaagtaattatagcttaaattcaataatgaaaatgattcctgccgagcgcggattcgtattaaaactgattgagaaggataaacaataatgagtatgttgcaacgcccaggatatccaaatctcagcgttaaattatttgatagctatgacgcttggagtaataatagatttgttgaattagctgctactattactacattaactatgcgggattctctttatggccgaaatgaaggaatgctgcagttttatgattctaaaaacatccatacaaaaatggatggaaatgaaataattcagatttctgtagctaatgcaaatgatattaataatgttaaaacacgaatttatggatgtaagcatttttcagtgtcagtagattcaaagggtgataacatcattgctattgaattgggaactattcattctatagaaaatcttaaatttggcagaccgtttttctctgatgcaggtgaatctataaaggaaatgcttggtgtcatttatcaggatcgcacgttattaactccagcaataaatgctataaatgcttatgttcctgatattccatggactagcacatttgaaaactatttgtcgtatgttagagaagttgctctagctgtaggaagtgacaaatttgtatttgtgtggcaagacatcatgggagttaacatgatggactatgatatgatgataaatcaagaaccatatccaatgattgttggcgagccatctttaataggtcaattcatccaagaattaaaatacccattagcatatgatttcgtttggttgactaaatcgaatcctcacaaacgtgacccaatgaaaaatgctactatctatgctcattcatttttagattcttcactgccaatgattactacaggaaagggtgaaaactctattgtagtgtcaaggtcaggtgcttattctgaaatgacttataggaatggatatgaagaagctattcgtcttcaaactatggcacaatatgacggctatgctaaatgttctactgtcggtaattttaacttgactcctggtgttaaaattatttttaatgatagtaaaaaccaatttaaaacagaattttacgttgatgaagttatccacgaattatctaataataattcagtaactcatctatatatgttcactaatgcaacgaaactggaaacaatagacccagttaaggttaaaaatgaatttaaatctgatactaccactgaagaaagtagttcttccaataagcaataaagaagtttctattcctaaaatgggtcttaaacattataacattttaaaagatgttaaaggtcctgatgaaaatttaaaacttcttattgattctatttgtccgaatttatcaccggcagaagttgatttcgtttccattcatttattagaatttaatggaaagattaaatctcgtaaagaaatagatggttatacttatgacattaatgatgtttatgtatgccaaagattagaatttcaataccaaggaaatacattttattttagaccgcctggaaaatttgaacaatttttaactgtgagcgatatgttatccaaatgcttgcttaaggtcaatgatgaagttaaagaaattaattttcttgagatgccagcattcgttttaaaatgggcaaatgatatttttacaactttagcaattcctggccctaatggtccaataaccggaattggcaatattattggattatttgaatgaaaaagccacaagaaatgcaaacgatgcgtagaaaagttatttcagataataaaccaacacaggaagcggctaaatccgcttctaacactttatctggacttaacgatatatctacgaaattggatgatgctcaagctgcttctgaattaattgctcaaactgtcgaagaaaaatcgaatgaaataattggagcaattgacaatgtagaaagcgcagtgagtgatactactgctggttctgagttaattgctgaaactgtcgaaattggcaataatattaataaagaaatcggtgaatcgctcggaagtaaattagataaattaacgagtttactagagcaaaaaattcagacagctggaattcaacagacaggaaccagtttagctacggttgaaagcgctattcctgttaaagtcgttgaggatgatactgctgaatctgtgggtcctttattaccggctcctgaagcagttaataatgatcctgatgctgattttttccctacccctcagccagttgaacctaaacaagaatcgccagaagaaaaacagaaaaaagacgcatttaacttaaaattatctcaagctttagataaattaacaaagactgttgatttcggatttaaaaaatctatttcaattactgataaaatatcaagcatgctatttaagtataccgtcagtgctgctattgaagctgctaaaatgacagcaatgatattggctgttgttgtcggaatagacctgttgatggttcatttcaaatattggtcagataaattttcgcaggcatgggatttatttagtacagactttactaaattctctagtgaaacaggaacatggggtcctttattacagagcatctttagttctattgatgaaattaaaaaattctgggaagagggagattggggcggtttgacggtagctattgtagaagggcttggaaaggttctttataatttaggagaacttattcagcttggaatggctaaattatctgctgcaattcttcgagtcattcctggcatgaaggataccgctgatgaagtagaaggaagagcactagaaaatttccaaaattctactggagcatctctcaataaagaagaccaggaaaaagttgcaaattatcaagataaacgaatgaacggagaccttggtccgatagcaaaaggattagataaaattgctaattggaaaactcgtgcatctaattggattcgtggggttgataataaagaagcactaactaccgacgaagaacgcgcagcagaagaagaaaaattaaagcaactttcaccagaagaaagaaaaaatgctttaatgaaggctaatgaagctcgggccgcgatgattcgttttgaaaaatacgctgattcggctgatatgagtaaagactcaacggttaaatcagttgaagctgcctatgaagaccttaaaaaacggatggatgacccggatttaaataattcaccggcagttaaaaaagaacttgctgctagattttctaaaattgatgctacttatcaagagctcaagaaaaatcagcctaatgccaaacctgaaacttctgctaaatcgccagaagcaaaacaagtccaggtaatagaaaagaacaaagcacagcaagctcctgttcaacaagcatctccttcgatcaataatactaataatgttgttaagaaaaatactgtcgttcataatatgacacccgtaacgagcacgactgctcctggtgtatttgatgcgactggagttaattaaggaataatatggcaattgttaaagaaataactgctgatttaattaaaaagtccggtgagaaaatttcagccggacagagtactaaatcagaagtaggaactaaaacatacactgcccagtttccaactgggcgtgctagtggtaatgacactacaggggacttccaggtaacagatctatataagaatggattattatttactgcatacaatatgtcatctagggattctggaagtcttagatcgatgagatctaactactcttcttcatcttcgagtattttacgtacagctagaaacactattagtagtacagtatcaaaactatcaaatggattaatatcaaataataattcaggaacaataagtaaagctcctatcgcaaacattcttttaccgagatctaaatctgatgttgatacatcatcacatagatttaacgatgttcaagaaagtcttatcagcagaggcggaggtactgctactggtgtgttaagtaatattgcttcaactgcagtatttggggcactggaaagtataacacaaggtataatggctgataataatgaacagatttatacgacagccagaagtatgtatggcggtgctgagaatagaactaaagtgtttacatgggatttgactccacgttcaacagaagatttaatggctattatcaatatctatcaatattttaactatttttcttatggtgaaacgggcaaatctcaatatgctgctgaaataaaggggtatttggatgattggtatcgttctacgttaattgaacctttatctccggaagacgcagctaaaaataaaacactatttgagaaaatgacagcaagtttaacgaacgttcttgtagtttcaaacccgacaatttggatggtgaaaaactttggtgcaacatctaagtttgatggaaaaacggaaatatttggtccatgccaaatacagagcattagatttgataaaacacctaatggtaactttaacggattagctattgctccaaacctccctagtacatttactcttgagattactatgagagaaattatcacgttaaaccgtgcttctttatatgcggggactttttaatgtattctttagaggaatttaacaatcaagcaataaacgcagatttccaacgtaataatatgtttagctgcgtttttgcaacaactccatcaactaaaagctcttcgttgataagttcaattagcaacttttcttataataacttgggcctaaattcagattggttaggattaactcaaggcgatattaatcagggaattaccacgctaattacagctggcacacaaaaactgataagaaaatcaggggttagtaaatatcttattggtgccatgagtcaacgtacagttcaaagtttattaggctcatttacagttggtacatatttaattgacttctttaacatggcatataactcatctggattgatgatatattctgtaaaaatgccagagaatagattatcctatgaaactgactggaactataattctcctaatattcgtataactgggagagaattagaccctttggttatttcatttagaatggattcagaagcttgtaactatcgtgcaatgcaagactgggttaactctgttcaagacccagtaactggactgcgtgctttgccgcaagatgtcgaggcagatattcaggttaatcttcattctcgtaatggattgcctcatactgcggtgatgttcaccggatgcattccaatatcagtgagcgctcctgagttatcatatgatggagataaccaaataactacatttgatgttacttttgcgtatagagtgatgcaggctggagcagttgatagacaagctgcgcttgaatggcttgaatctgctgctataaatggtattcaaagcgttctcggaaatagtggaggtgttactggactatctaattcgctttcacgacttagtagattaggagggactgcaggaagcatttcaaacattaatactatgacaggaattgtcaattcgcagagtaaaatattaggagcaatataacaatggggacctttcggtccccatatttttatttacggaatgaaatgaaagcagcaactgaagcaactaaactgtcttcaatataaacttcaatttttaccggagcttctgactcgaatttacctgttactacaccctgaaaaatactttcagtctgttctggctttgaaaaattttcagaaggaaaaattccgaactttttatctgttccaaaaattttgataaattcatcgtaaactgcttcattaaaagcattatcagcaggaataacgccttcaactacaagttcttgacctaaaaagcgcaaagaagatttcattttgtgttcctcatgttatgttagtaagtctattataacacaacacgagggacttgtaaactacatcttgaactttttagacattccgttgatgttaaccaaagaagccaagatttgagaaacttcgttttcctcttcttttgattcttctacaaggaattggttaaatccagtcattggacgaacttcaccagtttccatcagatggtcaccatcatataccgattcttctaattgttcagaaggaggaacgattgtgccttcgattagatacttgttataagcagtttctttcatcatgtacgtactcactttattaatcttcagcaaaattccacgcggtaaaataacttcagcttctgatggaaatcctgataaatgacctggaacgataactttgattcgctcagcccctttaattaccatacctacgctagtttcagcatcttcattagcatatgcagaatgactgcccatatgcattaaatcttcagcatcaacagaaccttctccttcaccagaaaatactgcgccggaatcatctagagccatatagtttttaccatgctcaccgaagatatttggtttaagcgatgtggatacgaagttcttgaaatagaacattttattttcaatattatgacgtaaagttttaaaggtaacttcttgtccacgataaagcgtagttcctggaggaagaactgaacctttagcgaatgcagaatcaagcgtctcaatatgtttaatagctcgttccatatattcttcacgggtagaatctggtttacccaaaaggaacgagttcatttcaacatatgaatctgcacaataatcttcaattacatcagattcagcttgagttaatccttttggagttacttcagtgcttgcgtattcatatgcctgagcagcagattcattaatcaatttataaatgccattcatgacaaattgaataatagctaccttttcgtctggcgtagctttagaacctttaactaaatcattaataattttcttaataacatcaaagctattagaaatattaatgtcagcaagatcgcttaaaattttatcagttttataatcaaagaattctttattctttaaatattcttgagaaccttgatatgttatatcgctctgcaacttgatagatggatcacgtaaacgtgcatgtgctaatgcaatatgatttcggaagttttctagttcataatcgttagatttaaaacgagaagcacttctcataccaccgatagctcctttgctaaagtttgaaccaatctgaataacgccagagttcattggtccttctgctttatataccggaactttggattcaaactcttgatatttcttagcagcgaagctatcaccctgaagtgaagcatcaacagtagaatattgagcttgtgctgctaatcgacgactaattttagttttctgaataacagcttgatccgtacgcttatcattttctaaagcaatagaagcagcaacagcaacagctttaggaacagcattacctgttttaacatctacataaacatcaccaacctttgattcaacttttgtgaataactcagttgaaataggaggtacacctggaatgtcttctaaattggcatttttacggtaaaccataatatatgcatactttttatcgtaatcccagatttcctttaaaagaacatatcgacctgctcctttagtacgtactaaacggtcagcaataacttgcatttgatgagctgcgccatttgttttactttttagtacgcggaataggcatgcatcaattttatactgtttcattgtttgaagagcagtatcaaaaacagcattaatgacgccaattggatttccacccaagtttttaagtttaactaatgatagtttctcattaacacctatcattacgatatgcatcattttatcgcctggcttaacgtttttatttgtatcaccgccagaggtgtatgtacaaaatctaaatccaggaagcacactttcttcgccggcttgaatagcaaaaatttgtggtattttatgcttaggatttaagttaacaaccggcgccgaagcgccgtcaaataattctgtaataagttccatgatttatccttgaacgaacttgtaaggcatgtttgtaatatctatgcaagacgcaataattccaagagatgattcgactttctgtttaacatttgatgaaacaaatgatgcaaaatcaactctgtcttctatttcaatatcacctgtcattgcaactacttcgccggtttccattaaatggtctccatcatagattaccgattcggtgagctcttccgtggtcataacttcagcttgaatgagttttgtattattagatgttgttccgtcattattagaagcatcagttattttattaactttgaccatcaatccacgcggtagaataacttcagcttctgttgctattccgagacttcctggatatacaacattaactttatgagctccatcaattgcccatcctatttgaactttaacgtattcaggattttctttatacgctcttatttcgtttggattaatagttattccttcttcatttttatcaactgttaattcattgcgagcttctggttctaaaagaccaataccagcatgtgtaattccaaaacgtccaaaaatgataggagttaaagaagtagatacaaaatttctgaagtagaacactttatttttaactaacgcttcatatataggagcagtcatactttgagcacgataaactgtaatgccttctggtatacggtcaccattttcaaaagctgaatctaagttatttatagcagattcaatttctttttcgctcattacatcgtatcgttctggattgtaacgacctaaaagaagattattaatgtctgtatatcctgaaccgcaatattctctaatgccacgcttttgtgatggagtatatttagaaccatcgcgggcaatagtaatatcaatcattggaccagcaccaattccagaaaaactgtaaatcattcgtttgaggaatttagtttttgctgcgttccaggaatttttagttatttcttcccagacttcatctggttgtcctttacgatttttattatgattagcaagccatttatctttataatcttcaaagaattgatttacagctgctgcgtatttctctaaacattttattgaagtagttggttcatttttaattgcattaaaaattacttctttaattttttctgaaacttcaccgacttgactcattggaaagaatttataatcatagtgaagttcatctgccgttccttcagcaataatttttgctgcctttgttttagaagctaatgaattaattccaattttcatttcttctgcttcgggaattaaaggcgcagtagctggtttattaaaattagctgctgtagattcatacttctggaataattcactttcaaatctagaagattccaatgactgactttgtgcaattgctctacgggaaattttaactttaacgattacagcttgatcagaacgtttatcgttttcttgcgcaatagatgcagcaattgcctcatttttagttacttgagctccagtatctttattgatataaacatcaccgaccttcgattcaactttagtaaagagctcggtactaatttccggaactcctggaatgtcttctagtgatacatttttgcgatgtataagaatatatgcatactttttatcataatcccagagttccttaagaaggacgtatctgccacctgaacgactacggataagtctatcagcaataacttgaatttgtcgagcttgaccagcggttttagacttaagaatacggagcatacaggcatcaattttatactgacgcattgtttgcattgcaacagtaaaaactgaattgatgtaattaattgggcttggaccaagacctttcaatttagcaattgaacctttagcggttaatgtaaaaggaacaatatgcatcattttatcgcccatctttaaatcgcgattagtatcacctccagatgtataggtgcataaacgaaagcctggttgttcaattgcatcatcaacatgaactgaaaaaatttgcggtattttcttctttggatttaagtttgtaatcggaagagtagtatcttcgtcaaataattctgtaataagttccatcatagcctctctagtgtttattctatttataaaattaaaggcccgaaggcctttaataatctagtggtaagagagtacggtatatttcaaactttggacctttttcataggcatcaaatgtttctgtgaatttattataagcatatgcatctacaaattcgagaatgacttgtgatacagaagtagaaacatctccaccttctttttgagcaatgacaattgtttctaagtaagctttcataaaccagttacctcatgaaaatcaccaaatacatcctcgaatgtattagctttagttttatcttcacgtaaacgaatcgcaatcggaagaaataatttaacgtaatcagtgcggccatcagattttaaccaaccattgcattcgcactctagaatttttccaatataataatttttgttttccataatgcgagtacggtcaagttcatgcgattttacaccggctttatcttttaagcctgaaccagcatttactttaatttttccacactctgactcaagaataaatccacccgctttagtagggtctttacggtgaggataaattcctacaatttttaaatcaacatcaattacttctttaaatttatagagattttttgaacgagcattttcccataatccatcgatatttttgagaataataccttcaagaccttggtcaatatactttttgtaaattaccttagcttcatctaggttatttactacctggttttcaattaaaattactttatcatagcctgatgtcatttgttctagtttagaaaaacgtacatcatactttaaacgaaatgcaggaagaccatatatttctactaatggaacatagtcccagacctgaaacttcatgcattgtgcttctttttcggaaatggttccctttaaagatttattagcgattccattagaagcagtacgtgattcagctacttcggcgaattctttagctttactaatttcaggataagcatcaaaaagaaaatctaggccttctggttcctttttaacttgctcatggtataccaattcgccatcaattaacacaccttctggatgaatctggcgggcttcagcggtcattttgatttaactcttccttaagaagatctaatcctagatattcattaccggctcgtgataaaagacgaacatcatctaattcatcacctctgacttcagcaaagcaccgagctccatcagcctttaactgtgcaaaagctggaaatttgatattcttattaatgcctttttcatcataagaacttgccagcatttgaggttgttcaggaattaaacctggccaaactttatttgcaatagatactgaagcaccgcattcaaggtctcgcatcatcactcgacgcaaaacttcaacatcatcttttttaccatcggtgatatatccaattaattcctcaattgccgcatttccagtcaatttccgagtagctaacgtgaattcaatgaagtcaagcatatcggtaagagtcaacattccaaaactctgggtagcaataccaggtttaggccatttcttgatataatactgtaacccacgagaataagtcagacgatatactcgtttaagcaattcgttatctttgttcttttcaagaattgcttgcttctgcttagttgaaccaatagatgctatttcgttcagaattttaagaatcattgttcatcctttagagtttggtttacagctctattataaatcaattcatcattaagctcagtcaaagacctgtggtacgttgttctaactttatttccttgcatccagtgcttgacgtaaatgaaaccttgctctacacattttttaaaaattcgttcgtctttttgagctcggaattctggattgcatctaaaaaattgatttacgtgaccgtaatcacgtgtagtattaccttcattttcataaatagtgtgaacgacaaacattagaatgctccttggaaaatattatcaccactagtaggtctattatacaaatactctatgccaccgggtttaatatagttccatgtctgaaacggatgcgtctgatatggatgatatggattataaggattaaatccaggagttctccaggtagtattccaacgaaaagaatcgtttttaatcatcttctcgattgcatcttttattagctttttcactatcaaaactttctttattttcctttggtgaaaaaagcttattctctacatcattccatgtataaactcgctgagcggtttttggaatattgtcacgctcccctcgagccatccaataaacaggaacatttaataattcacttgcatgatcgcagtggtgagcgagatcgtcaatataacaaattacgttatatttctcttttgcctttttgaacaactcttcttttgaagaatcatgaccacacatcaatacttctgagaaggcaccaggaaaaagagcattcaaattaaattgacgattcagcaaagcatcaatagaatcacccaatgctgtaacagctacaaaattataatcttcttttaatttgttaattacacacagggcatctttatatggagacaaatatcgaataaaatctgaacgattatacttttcgattaatttaacaccaagctcttcatcgcaattaaagagcttaccaggagaaataaatttttcgtcctgaatcatttttaaaatatgttctaatggaagattatatttttgggcaaaataaggaagacctgattgccagcttaaacatacaccatcaatatcagtcaaaatagtaggcttcatagagagtctcttaataggtttaacacatcaataaattcagcttcggttaatattgtatcatcttttgttagaccactagccatgctgtgcttcaaaacttttcctttcgaggcttgtaatgcatcgcgaaagcccctgttttggaacgctgcttcaaaatatgcatttgtgtataattctttccacgctggggagtatcttgaaaacggaactccaagccaaaagagggtcccacggtcctgagctctagcataagaccttccagcttgttgggcggcaagcccggataacccaaatatacgtctttgctgttcaacatttttcaccttacatccttggaggaatccttcaagacctccaaattgaataccatccataacgaaaggccattgggcgaaattacttaatgcgcatgatggccatttaaaattgcttctaatctctaactcagacattttcaatgcttataatttcaacatcagcccaatgaccatagcaaggaagacgaaattcaactggccagttagggtccttttctaatataatagactcaacttgtggttcttcatgttcatcagtatatggatttttatctgttactttatatgtgaccttaatgtactgaattccaaaaatcttattaattatattcatactaattcctttaatccgtaaataggagataattcatcgcccatacgaaggtcttcatttccatctacccaggaaacaatataagcctcttttatttgaataccactccatttaaatggaggtagaaccttagaaattaatccaggtataccaactccctttaattcaacagtttgacctaaaaagaatttcattagaacctcatctgaaaaccgtgcgatttaacattacctccgccaatatcagaaatgttaatttcgcgcgcaattgaagggtcaatgtcaatttcacgattgagtttagtgatagctaaagtatcgcgcccatttacagtacggaactctaaaggacatactacattaacgtagtttttaatcgattcactggtaggttgcaaatgaacaggaaggtctttaggcgcctttgagaaaaccacttcacagaaatttttgcgggtatcaaaataagtagtcataaacatagtattttcctcagtaaggggccgaagcccctcattttattttaaatatcaaattcgttaagaactacatcaaagattgcttcaagatgctcaggtttagctctgttactcagaatatgacgaatccaagttttaaccagaagcttgcgattaacgccattccagcaaggatgagtccctaaatcgcgttgacgaaaatcatcatccagagcgattttgaagttggaaccttccattgtgattgaaaccgtgataccgttttcaaatcgcatataaacgtagttaggagtcatatactgttcaatttcgcatactgatccattttgatgtttccaaaggcaaatagtatcaatagaacctgcaatactattagaaacatatttacgttcaaagttgatgtagttcattttattctccaagatgtttaattgcggtacaggtatataatatcatatcctgtaccaaagtaaacaattattttactaatttccaatgctgcatgtcaagtttaccaacttttttcatcttctcaattaagcgttcggcacgttggcgagctgtaacataataccattcacctaattcattttgttcaatttttccaacgattactgtattcaattcataaatccaaccagtaaagaaattatgaacttgaattgtaaaggtgaaatctgttcccataccttctgttgtttctacttcaataatatcaccttcaactgccattaagaaccacatagtttcatcatatttaccattgaagcatttagttttaactgcagcgttcagattaatcgttttcattttattctcctttgtttgtgtaagataatactatcacaaaggaaccatactgtaaacaactttatgcaatctttggaaaataaaaaaggactcccgaaggagtcctcaacttatgctttctgcttaccaaaacgagaagcatcatctcgaagaaccgcacgtgctcggcgcatgatcttctcaacagtttgattgatacgagagttcgacccacgcttgtagccagcgcgtttagaatcaccaactttcttttcaactgctttctttgctttaacttgttttgccattataaattctcttttaaatgaaaatgcaggacttattggcattgcctgcgcaagccctcaaggggaacataggtttttggatatttaacgaccaggataaccataaacccgtcatcattcacattcaagaggtacaccgtaaaactgccggggtcttaaaactataatgattcgcaaatcattaatcagacagttcgacggctcctcgattttagctcacactaaggcagtgaatctccaataaattacttcaatgttaccacaaagtgacgaactgcttttcgtgcagcagaagccagaggcttagcatacttaagttcatctttttcctggagctcagcagctaatgcagtttgagcaggatttagatgtttgaaataacgcaggatttcaagagcttcggcctcaacatcaatagatgcgccatagttttcatgaccattattccatgcgtttcgttgcagttcaagagcgtgttgtaattgtttaatcatttaaaaattctcgttagagattaaaactcggtagtcacgttcttctgaatttcatcttctttcgacagatctctcagttgtagactaccacatagaattgttcggttaacttattattccgacacccaattcatattattatttatatcacttataaagacacggaatagctttatagtgacaggtaacaaatttttgtttaatttcttttggctgcttaagacccagagctacaaaaggatgcggaacatttcgaatttgaccaactggaagagaagtcaaatcaccaacttcgcagaaaccttcaggaacatcaggaccgacagagtgaactacacacagttcaggaacttcaccttgaacacgtttaccgatgataagtcctgattctgtaacttcttcatcaccggcttgtgcaggttcagaaactaaaataacatattcaccgacagcacgaattggtagctgttgtacttcagacatcgtttttcctttttgttaacagatgaattaataataacaaataattcttaaagcatttatttaccaataaattggagtaaatgctcaactttcataccattaacagaaatcaatttgtcaatagaaaaacctcgccatgcaccaagctcaacatcaaatactggaatcatgtcagtagattctttccgagtagattcagtcaatttaccagtttgcatggttggcataaagtctgcatcacgagtacctttcatagtacgaatagtaccatcagacttttcaaaaactacgtttgaaacacccatggacaatttagttttcaaaatttcacgaattgctactttctgctcagttgtcagtttcatttatttacctattacagttttaatatgagttgttccacgttctttaagggtggaaagtaatttttggcatttttctaaatcagatttccaactatatggtctatcaatactagtccaatcagttttataatactgtttccatttagaggaaaaaatatttcttatactctacagcaaatgagatgttctcattagaataagaactaattgctgtgagctttaccaaacgaaatttcattattcaccacagaattcgttgatattttcccagtttaacttattcaagtttttcttaggaacattaaacacttcaatacctgcatttcgcagaatatcatcccaaccaggtttatttttatcgtatgtttcacaataaactagctttttaataccagattgagctatcgcttttgcgcaatccggacaaggagaaagtgttacatacatagtagcaccttcaatagaagaaccatttcgtgcagcaaacaaaattgcatttagttcagcatgaatttcatttttagatgaccattccgagtgagcactacgatgttctttcgccaagacaaaacgatcagttgaaccaaacgatacacattcaggcttatgaccttgaatgatagtatgtttaggtttattcaacaaccaaccttgctcagcagcataatcacagcagttcacacccccggcaggtgaaccattatatccggtagaaataatacgtccattcttttcaattaccgctcctaccttccaggagcaacattttgattcttgtgatactaaatatgcaatttgaagtactgtactcgctttcatttcataatcaccagataagcagatttagcagtttcaacacgataaatttcgtgacgaagtttagttatacttttaataacagaactaattatattctgcccatctttaaagcggtttttcttatcaataaaaattgcaccagccatctttttgtgaagctcaactggatacttcgtcacaataatagcatcatacacagaaggatgaatactattcactagagtgtcattcattaaagttattctaatgaactgtgctgtgtcagagtcaagcgctctatgatcgccagtatcattttcaagacaattatcaattatatcagttaaattcatcatagtacgccatacaccctttgtgcttcaactaatccatcaaaatccaatttgagatgtgttatttggtcaccatcacctggattcacaattactaatactgaacgaggagtttcggtaataacacgaaccgatgtttcaggaaatcgttcagaaaccttatttaccaattcctgtgcaaatagcttaactttttcttggaattctttaacagtaattggtttttcacttagcatgttgatcccagctccttactttcaacgtttttaactaatttgacagaaactaattcggcatcttgggtaatcattaccgggccttcttcatactcttcaagatattctagagctttctttttagcttcttccttcgtatcagtttgagcatagatatagaacatacaaccagtaatacctactactttccacttaatttctttatcagttttaatttcaaatttactgatagagtcatctttttgaacttcttcgaaaaaataatattctgacatataagtaattgaaaataacgggctatctttataagattcgcccattacatcaacagctttataccagcagtcatcaatttcacgtttaatgctaataacatttttcgcagaatctatttttactttaaatgaattttccccaataaacttggcaattcgtttattagccccgcaagtttcattaaaaatatctttatatccagctttaaagcgataaaccttatcttcttcaaaccatttgctcatttcaatttcctcatttgttttggtagagctataatatcacaactctaccgtaaagtaaactgttaaattgccttgaattctgatgtctgtgattcaaaacgaatatcgcctttgatgactagctcagcatcaagaccgaatacgacaatgatatgtgcggaacctggatacagcgtaatggcaatagaatcaacctggtctggaagcaaagtattcaatacatgagtcacttgagcatgaattcgaagctcggctgcgttatcaagcttttcaaacatattattagcgataatttggctaaacactacttctacgattttagaataagtcggaaacatatttacctcacataattttcttcaagccaatcaataacatccaacgcattatcaaaagttgaaccatctactttatcttctgtttcataatcaagaacatctaagcctactcttccatcaacaataggccataaacaaaatagatatttcttttctttttcaattttattacaaagacgataaatcttttctatattattcataagttttccatggtaaaggcagtttagttttctttactgttagttcaatatcaggattcttttctcttaatttaaggcattcctcccaagctctgatttcactagtgaatacacaaaattgcccattactagtaccaactaaaccactatttacaataacaatagaccaagtttcatgatgccacgccattaaaaatctcccgagtcaacttgccagcattcaacaccgatgcggcgccacatttcaactacttgagttcggtcatcaatagctaatttcacatcaaaatgcggtgcgatgtgtttccagaaaatttcttctttgactacatcatctttacgggtatcgccttgttcgcgttgacattgcataactaatggaacgccagcaatatcctcaacccatttacgggtcatacgataatatttcgttgggtcttcttcggttccactttcacggcctgaaacgactacgatgtaatatccttgcttatcgtacatcttagctagttcaacaatcataggattgataacatcagtatcacatttttcaaggtcataaggaccacgaccattcattttggctagtgtgccatcaacatcaaaaataactgcttttggtttgccaggagtccctttgtataccggaagaccgagatactctcgcatgcttttatacattgagcgtaaaacatcaattggtactgctttagttccacgctttgagttacgtttaaccaattcagtccaaggaacatcaaacactttatattcaactttccagccgtattctttggcaaaagtttcccatgccaggcgccgttcgggattcaggttagtatctgaaatgattactcccttgacagaatcaccgccatacagaatatttttagctgtatcaaactgcataccagatacgatgccttctttctttttggtatacttatactcatcgcgttcttcatgtgccataatagattggcgatagtcatcacgattgatattataaaatccaggatttttagcaataaattcacgagcccaagtactcttacctgaaccaggacatccaacagtcaaaataatctttttcatcatttaattcctaagaaaacttcaagaatacgaatattatgctcacgccgccctttatataattcagctgtcgattgattcaccgatttgctctgaacattagatgaaataaattttatcatgtgatttttaagctgatacatatcaagtccacgggcttttgcttcttttcgtaatgctttaccagcgtcatctaaagctttcgcagggtcttcatcatttaatactaccccacggtccaaatccatatatactgcaccattacatgcatcaatgtaacggtctgaacattcaatataacgttctagcagagttttcatttatttttctcaaccaatgattgaatataatcatgcaggtctttagatgctttaccccacttattttgatattcatttttaagattagcccgagattgagctaataaaacatcattagttggaggtaaagattctaatcgttgaatctgacgtccataaatcattgcagccatctcagattcataaatcaatcctttgagatgttcaaattgatgccatgaaatcatttacatttatcctcttttagctcttgacgataatagcatatcatagttttttggtcatgtacatatcgttttacatcattaagccaaatacgaaattcctgggaatcttcaaatggcataccgacccaagctttaccatcaataactttaacttgccaagatagtttagcttcatcatatgactttatttgtacaggccaattaggatgaactgtttctttctttacttctagaggctttgtcgaacaaccaactagaagaccaatagataatattactgctgatagtttaatcatttagaaaggtcctggatgtcttctgcgaacttgttgaaggagttgttgatttgtttttcaaccaatcctggcttatgagccaccacatccgccttctttgcgtctttgcgcagtttttcattttcacgctcaatagcagcaattgcctcacgatttttattattcatcgcatcaatataattatactgaattcgcaaattatttaatgctaaagcgttttcattggccgtttttgtaatttctacgacagacgtttctaatctttcaattttattttttaaaattaaagaagttccgcccaatgcaattacaattaatagcaagcctgctgtcgtattacttaattgcataaagttttaataacctctataatatcgtcttgagaaagaccgttaattaaaatatgatgttcagccggagatttagaaattttaaagcatgcctcaacatcttctgccatatccgatgcgctacgatttggattactaattccaagacgatgttttcccgttaaaggattaacgatgatatagcatttacagttgttaatatgaacattaggttgagtctgattaatgaacacatcgcaatcatatttcgcaagctgattttctaaaaagactttcatctcctcaaccgcatcaggaagcatatcacgggcttgctcaagacgacgatttcgatattctttaatggtcgttttccgcttgacttgtttagctaaatctttcttaagatcggtgatatatccaactcgacgatttcctttaaatacagaaatcccatctgtagtatcaccgtatgcttcaacgaccatttcagtagtaataagctgtaaatccatcataaagtcctcatgttatgtcagtaagactactgtaacacaacacgagggacttgtaaacagcttagtatccttctgggataaattttttataatttttcaaaaaattctgttcgatttcacacatgaccttctcttgactatcatacccttggtagaggctcatgatgataccgaacagatgttccattccagcacctttagcaacgccttgcgcttccatcgcataagtctttctatctttgccgcaatgcttattgtgacagtcaagaactaaaaacagagctcggtctaagtacttcagataagtcgtctcaaatgcttcaatttttctatatgagtattcatcgtcagcgtacattgctttaagatcatctgatgcaccatcaataatagtcttaaacaatttttctggattatctaacgaactttttgtactatgaagagacacataccagtcagacttaattttaaaatgagaaccatctttcatcacagcaacatagccttcgatgttttctgcatttttagcttcttctatccatttagggctatcgacttcgaatcgttcaactagatatggacgaagagcagcatctttataaatatcatcgtatgaaatgtattcaccggtttcgttttcacgaatattcaataaaatgattttcatctcttgataagcaagaacgattctattagttggagcgacgaattcgaagttagcagtaaatccatcttcggctaattctttaagtctgtcgcgcaactggtgatgattaatattcatcaaaattccattagccattaaagcctgttcggatttgattgaaccctttgatttgaacagaatttcatcaccgtctaaataagttgataccaaagacccatcttcttttgttagaatgtaatcaacatcatttaaatcgatattcatcgtgaatggattttcatttaagttaaaaaacttttccatgggacgagaggcaattcttactggtttttctccatccatttcaaacatgattccacgacattccagtgcatctggaagtaaccaatcagaataagatgcataattatatgagaaaattctgtaagttcttccagatgcacttacatcatccgagtaaaaaaaacttacgctgtgaatccttacatagttccattaaattgttaaaaagttcttgcattgtgtatcctcttttgtgttttgaatatagtaccacattccatgtggaagcatcattttttcttatgttgaatattccaaggcgggttaaacagtttaatgaatagtggctcctctaggtcaatcgttgcgattgtcattgtacctaactcatttgtcatagaaagattaaaacattggcgggcgtaaaattcaactttgcttccttcctttagcgcagcatgaattaatgcagatttagtagaatcagacgttttgtctttacggttaatagcagttctataatagtttattcttttgcgtaaatttttagtttttccaatataaacaagctcatcatttatagcaatagcataaattacgttatacttgtttggaatagataattgttttatacttccgttgtcgtctaattctagctcagtatatttaataaatgaatattctgttgcaatttctttcataataaaatgggccttgcggcccactccttaaaagtattttttaaaactcatcataactttatcatcaacatcattatcaatctgtgcaacaagataagatgacagttctacttcttgtggcgcggattgaacattatcagaattaagatattcacgaatccaaggatatggatgtttaaccggagcatcggtaattgggcatggaagaccgcactgtttcatacgagatacagttaagtaatcaataaagctccacatgctatttgtatttaatccaggaacatcgccatctttaaataaatgaactgcccaatctttttcttggcggttaacttccatgaaaatatcaactgcttcttgttcacactcttgagcaattttaacccattgatcgccatcagtaccagattgaagttgacgaataatatattgggtgcctttaaggtgaagctgttcatcgcgtgcaatgaacttcataatcttggcattaccttccatgatttccatgttcttatggaagttaaaggtacatgcgaaagatacataaaaacgaatagcttccaatgcgttgattacatgcaaacagaggtaaagagatttcattagctcacgcttccaatatgtctcatgctcaatagcatcttcaataacgtcttcgtctgcattaatttctttttggtattcgatatcagctttagcgttttcccaataacgagttttaatcagaacatcatcataataacgaccaatagattcagcgcgtttcatgatagctttatctaatacaatctcatcaaatacctttgatggatcagtataaagatttcgcatgatatgagtatatgaacgactgtgaatagtttcactaaaagtccatgtagcaacccatgtatcaagacttgggtctgaaattaatgacataagtacagcagatggcgcgcgaccctgaatgctatctaaaagtgattgatacttcaagttgttagtaaaaatattttgctgatactgaggaagcttattaaactgtgcagcatccatcatcaagtttacttcttcaggacgccagaaaaatgataattgcttttcggttaaatcttcaaaaactttatgacgttgaatatcataacgcgcaataccaagacctgaaccaaaaaacataggttcttttaaaacatcaactggatttgtattaaaaactgtgctcataaattttccgcttagttaatagttggtgactcgtccgtgagtcaaattatatcataatttacaggatgaacaatcttcagcttttggagtttctatttcataatcatcagtaccagaaccatcgcgggtattatgataatagaaattttttccgccaaaataccaaaaatacaaaaggtcatcaatcattattgacattggaacctttccttttggaaaaatctgcgggtcatagtatgtattcgccgaagctgattgacaaacccatttcagcataatagctacctgcgtaagataaggtttattacctttcttagctaatttccatgtatagtcgtaaaggtctatgttatgctcaatattgggcacgacttgattaaaggagccctcttttgattctttaacagagactggtccacgtggaggctcgataccgtttgtactgttagaaacttgggaagatgactcacatggcataagtgctgataatgtgctattacggatgccaaagagcttaaggtcttcccgcagcgccgaccagtcacaaacgtattttggagctgcgatttggtcaatctttttattgtaccagtcgataggtaattcgcctcgagaccaacgagtgtctgaataatattcgcaaggtcctttttctttggcgagcttaatggatgctttaatgagtccatactgtaatctctcaaatagttcatgtgttaaatcgttagcatcttcataagaagcaaagttacttgccagccaagctgcatagttagtaacacctacaccgaggttacgacgctttttagctttttctgcttcaggaactggatatccttggtaatccaaaagattatcaagagcacgaacttggacttctgctaattcattaattttatcttggtcttgccagtcaaaattatccaatacgaatgcagagagagtacacaatccaatttcagcatcaggactattcacatcatttgttggaatagcaatttcacagcacaagttactctgacgaataggtgccttttcacgaataaacggagtatagttattcgtattatcaatgaactgtacataaatccttgctgttcctgaacgttcagtcatgagcaattcaaatagttcacgggctttaatacgctttttacgaatattagggtctttttctgctgcttcgtataattcacggaaacggtcttggtctttaaaataagaataataaagctctccacccatttcatgtggactaaacaaagtaatgtaatcgttctttccaaaacgttccatcatcaaatcattcagctgaacaccataatccatatgacgaatgcggttttcttctacgcctttgttatttttcaaaacgagaagattttcaacttccaaatgccaaataggataataagcagtagcagcgccgccacgaattccaccctgtgagcatgatttaacagcagtctgaaaatgtttccaaaaaggaataacaccggtatggcgtacttcacccatgccaatcttagaaccttcagcacgaatcataccaacgttaataccaattccagcgcgtttagagatatattcaacaattgaagcggaagccttattgatagactttaatgaatcacctgcctcaataacaacacatgaactaaactgtcgagtcggagtacggcaaccagccataataggagttggcaatgaaatctgtcgagtagatactgcttcataaaaacggataacgtgttttaatctatcaacaggttcatcttgatgcaatgccattccaatagtcataaatgcaaactgtggagtttcataaatttgaccagtggttttatctttaactagatatttttcttttaattgcatcgccccggaataagtaaattccatatcccgctcgtgcttaatttttgattctaaaaatgtaatttcttctgctgaatattttgacaataattcagggtcgtatttaccttcatttacacagtaagaaatatggtcaataaatgaacgcggttcatactgcccataaacatgcttacgaagagcaaacattaaacaacgtgcagctacatattgataatcaggctcttcaaccgaaatagaattcgcagcggccttaatgacaatagtctgaatatcatcagttgtcattccatcacggagataagatttaatattttcatataattcataaggatctactgatgttccttcagctgcccaagataaaactttaataattttttgtgggtcaaagctctgagaaacaccactacttttgataacattaattaattgcataagtcctcaacttgaaaatcgtctttaaacaatcggttaactatatgagctattatatcaccatgacacggctttggtttacatgtgcatcctagcctcattccacgtaaaggctctaaatgtgctttagttatttctccggatttaattcgacgtataaaatcttttttgaataattcaatggcagcctcccggctgccagcatctttaccgacgtaatttccccaaaatgtaccgcggtgaatattaacatcaaagtcggatttgtatttattcactacccggcatagacggcccacgctggaataattcgtcatattgtttttccgttaatacagtaatatcatagtaacaatcggaagaagttttaactgtggaaattttattatcaaaatactcacgagtcattttatgagtatagtattttttaccataaatggtaataggctgttctggtcctggaacttctaactcgcttgggttaggaagtgtaaaaagaacaacgccagaagtatctttaaatcgtaaaatcatattgccattttccctttaattgctggatgcgattcataattttcaaggataaaatctttcggtttcatgtattcagttaaccagtaaagctgtgtttcggtgtcacaatttccaaactctataggccaatcaattttaagttcacacagttctttaggctcacgacgtaaaatttctttacattgcgcagtatgattcatatagatgtgagtattaccaccagaaaatatcaaatctcctgggataagattacacatcttagccacaatatgcgtcaaggcagcgtacgaggcaatgttgaatggcaagcccaagaaaacatctacacttctttggtaccattgtaaatcaagataaccattacgcacattaaactgatagaacatatgacagggcggtaatgccatttgattgatttcagctggattccatgctgaaacgatttgacgtcgatcagttggtaattttttaatacgatcaatagtttcaactaattgatccacaccgccgaaatcacgccattgtttaccgtatataggaccaagttcaccactatgatatcctaggtctttagcctggttttcatagttatcgtcccaaatagttttaccttgaataagactgccatgagtgcgaagacgtaaatcattaacattggtagaaccggaaataaaccatagaagctcagcaatgcatgcattccaggcgagctttttagttgttattgcaggaaaaccttttgttaaatcccaacgcaatttagtaccgaacaaagcaattgttcctgtgcctgttcggtcatcggtttcatagccattttcaaaaatgtctttaattaaatcttggtattgtttcatttagtaccttatataaattataatacattttatgaagctaaataatcaatacggtttagcatcaaattttctctcaatttcaggtgtgaaatataattctttaccgcgtttggaaaaacgaccaataatatgataattattctcatcaaacgtgatattaccaatatccatagctttcaaccaaatatcaatatttctatccagctttatgtcaaaattccaatacggagaactattaccgaaaatactgcaagcggattcagtgaaacaactactataaatcttgtctttaggaactactaattgataaacgcctttaataaactgaggaccctgccactttggctgtttctcatctttttctaatagaatagggtaataattaaaattcatatttccgccacgcgttatttcatttatatactgattccgtaagggttgttacttcatctattttataccaatgagtttcaaccatttcacgcttgcttatatcatcaagaaaacttgcatctaattgaactgttgaattaacacgatgccttttaacgatgcgggaaacaactacttcatccgcataaggtaacgcagcatatagtagagcgggtccgccaattacacttactttggaattctgatcaagcacagtctcgaatggcgcgccagaaattgacacttgaatttcgtcaccagaaatgtaatctatatattgctcccaagtaatatagaaatgtgctaaattaccatctttggttacaggataatcacgcacaaggtcacataccacaatatgactacgacctggaagtaatgtaggcaatgactggaacgttttagcacccataatcataattgtaccttcggtacgagctttaaaattctggaggtcctttttaactcgtccccatggtaaaccatcacctaaaccaaatgctaattcgtcaaagccttcgacggttttagttggagaataagcgaataccaatttaatcattacgcaaaacccctttcaagaaaccattcagtggctttattagcgtcaaagaataattcttcatatgtcttttctttgttttcaaaaactgtcacacaaacacgttgacattctccacagtattcttctgacatactcaaagcgtcagaaaacatttcattaaattcacttaaatcaggattatgcaatgcgttaaaaattgcataatcgaattcatcattcataaattcaaatacaaaaatcatattattttccttaaacaagactttttcacaattttccaatcagctttaaactgctcgacgtcagaatggtaaatccagaatcctgcgctttctccatcctcataaagaggacatccatcgcattcatcttcccatcccatatcacgtaaaagatgttcagctttttcaacaagttcagaatctttaccgatgatattaaaataccatttacctctaacttctgaatctttgatgctttggcgttgtaatctcattttattctccttaattgatagggtaatagtatcacgctactacccttctgtaaactactttttgaaagtttttcgcaaaagttcaatgatttcatctacattgttttcgtcaacaatgcagtgaatttttgttacgccagaaaccgggtctttgacttcatctttttcagaagtcggttctttatactcacgaaaacaatgaaattcgtcttcgcaaatttctaaaagtctatctttgaggtaaaaatgttttccatttgcgcattcaatgtgttttactgctttatatccattagcgacggaaacttctttaacttcaaaccatccgccattctctcgaatggctttaactattgatgaattagaacgtgggctataattaataaatgtatcaataagtcttggaacaagttcatactttttaccggtatacattacggtttcctcattttaataggggcttgatagccccttgataattattgttcaatcagtcccatgtaaaattctgcgtcttcagaatccatgccatcacaatattcattagccataaagcgggtgaggtcttcaagaggaccttcaatgacaatagaaaaattgcaataattgggatcatcgtgaatacttgtgatactaagttcaggataacgattacgaataatttcttcgatatattcaaaatcaacgatgtcaatatcaactttagccatattattttcctctttaatcatcagcagtattgccgatagttgtatagtaccatggaaggacaaggatgtaaaccattttgtgaaaaaatttttgaaataaaaaaaggggaccctagaggtccccaattaattagtaatataatctattaaaggtcattcaaaaggtcatccaggtccgtgtcatcagcactagatgaactgccagagcttgagctcataaaatcatcttcagtttttgtattgaagtcatcaacattgaatgcatccaaatcatcagcaactttatcagctttcttagcagcagttgcagcagcaccgcccatcacagcagttcccataacttgaccgaatttagtgctcagttcttcaaacgatttgaatttatctttagaagtcatttcagaaaggtcaaccatttgttcgaacagttctttctggaaagattcatcgtcaatgtttggaatcgcagattgattcaggaatttagattcatcgtaattactaaatccagaaacctgtttaactttcagtacaaagttagcaccttcccacggacaagttacatcaaccggagtttcacccatttcaacatcaaccgcaatcatcgcgttgattttatcccagattttcttaccgaaacgatatttaaatactttaccttcattttctggagcagctgggtcttttacaacaagaatattagcccaataagaagttttacgtttaacaagactgtactctttattgtcagtgttgtacaaatcatttttattgatgtactgacatactgggcaagaatcgtaatcaccgtgggtagatgaacagttttcaatataccatttaccatttttcttgaaaccgtgatttacaagaattgcgaatggtgcttgttcatcatttttagacggaagaaaacgaattactgcttgaccgttacccgcattatcgagtttcagtttccactcgcctttatcttcagaagaaaaaccacctttatttccagccagtttagccatttgtgcagcgagttcagcagtagatttacgtttaaacatttttatttcctttttaatttaattaacagttggtgctatgacgatgtatgacctcatagctggtcagtgagataattataatctatttataataagcaattaatatttgcaagatttcacagtttcaataaaaacacttttagctttctgtgaatcaatatttaaaatttttctataagcctttaactttatagaataattattccagactaaattatcagtctgttcatcatgtttatcaattatatttaaaaatgaatcaagcaagataaacgtctcaaacgaaattatattcgattgaagtagtttaaaaatataacttgattgaacttttggattatactcaaagatttctttaaaagcagaaacttcaacttttttactaaaataatagatattcctaatatcttcttcaaatttaaatttaacttgctttaagcgaccgatatattcacgataaaatactaatgcatcagcgtcagagatatcaccaatccaagcatcttggttagctacaagattgctaataaaaattaaagtcaattcttttaatttatacttttctgatagcttttggaaaaaatacttatctcttcgtttttgataagcggcatcagacacccgcatgcaccaattatacttaataacatcatactttccattcatatgttgttttatcattaagtataatttataaactgatttaccatcaatgtatctttcaccaccagcaggcatgcggagtttaatcatagtagaaaatctaatgtattagttttttcacaacgaacaacagaaggacgtaaaagattttcgtcaatggcttctgactgaattttttcaattatacccgaaggaataaatttagcaaattgagtttcaggaatagaattttcttctaagaatgctgttgtagcttcaagataactcattccaaactcttctaccattttttcaataataaatccattttcttggcggtcaagaagctttgcaatttcatccttttctttcttaattgaaagttctttttctgaaagcccggcctcatcgaccgggcgaatatcatttagagaaaactgtgtcataaagttcaactacctcttcagtttcagcttcaaacacatcacggttatctttatgatatagagccaaaagacgattaaacatcttgccatcaacaccaagttcatctttggcacgaattcgaatatctttaatcaattcattataaccggaaattttcagtttatgatcagatgcttctttaataaatttagccaagtcttcgccatggatagcttcatcaaattcaaccatttcttttttagccattattcacctcaaaattcattaatgctattagttaatttagaaagacccgcttttacaaaatatgaataaattttgccacgcggtggtaatttatatgaattatagtaattcacaatgtttgaagcaatattatcaggaatataatcaaaatcaattagaactagattttctttataacgattatattcagattctgtgagaagcaccttagcttgctcacggtcattagcaatagcttcaacgattgaagttttcattgaaggagttcgttcaccttcaactttggtaaaccaaaagtcagatcgtactttaactgaagcaacgttatcctttttgtcgcctttaaggattttagtcatacagtcaatttcagcagaaccgcttttaattttaacccatttcttgtgcatcggtgaccattgcttaacatttgggtatttgtgaagttgagtaaagtcaccatccgatgaaatgattaaaatcttatgtccttctaaagagaactttttaacaagaacagcaatatggtcatctgcttcatacttatcaatatccataacaatgtatggcatataagctttcaattcatctataactttatggctggattcaaaataaccttcccagtcccaagtagattcttctcgtgcttttccacggtttttcttataataataagcgaaatcacgacgccagtatccagatttcgcgttatcgatacacagtacaattttagtgtatccaagcgtttttgcttttttgacattaaacttaattgagttcaatatcaaatgacgaaccattgataaattaattttttctttatctgagaagtttactaaagcagttgaaagcgcaatttgactaaagtcaataaagcaaattccttctttgtaatcttcatccagcatcatttctaaatccatatgaacctcgttcaattagtgagatttctattatataccatccaaatcttaaagtaaacaagtataaatacttattattgaaaacacaataggagcccgggagaatggccgagattaaaagaaagttcagagcagaagacggtctggacgcaggtggtgataaaataatcaacgtagctttagctgatcgtaccgtaggaactgacggtgttaacgttgattacttaattcaagaaaacacagttcaacaatacgatccaactcgtggatatttaaaagattttgtaatcatttatgataaccgcttttgggctgctataaatgatattccaaaaccggcaggagcttttaatagcggacgctggagagcattacgtaccgatgctaactggattacggtttcatctggttcatatcaattaaaatctggtgaagctatttcggttaacaccgcagctggtaatgatattacatttactttaccatctaccccaattgatggtgatactatcgttctccaagatattggaggaaaacctggagttaaccaagttttaattgtagctccggtgcaaagtattgtaaacttcagaggcgagcaagtacgttcagtactaatgactcatccaaagtcacagttagttttaatttttagtaatcgtctgtggcaaatgtatgtagctgattatagtagagaagctgtagttgtaacaccagcgaatacttatcaagcacaatccaacgattttatcgtacgtagatttacttctgctgcaccgataaatattaaacttccgagatttgctaatcacggcgatattattaatttcgtcgatttggataaattaaaccctctttatcatacaattgttacgacatatgatgaaacaacatcagtacaagaagatggaactcattccattgaaggccgtacatcgattgacggtttcttgatgtttgatgataatgagaaattatggagattgtttgacggggacagtaaagcacgtttacgtatcataacgactaattcaaatattcgtccaaacgaagaagttatggtatttggtgcaaataacggaacaactcaaacgattgagcttcagcttccaactaatatttctgttggtgatactgttaaaatttccatgaattacatgagaaaaggacaaacagttaaaatcaaagctgcaggtgaagataaaattgcttcttcagttcaattgctgcaattcccaaaacgttcagaatatccgcctgaagctgaatgggtgactgttcaagaattagtttttaacggtgaaactaattatgttccagttttacaacttgcttatatagaagattctgatggaaaatactgggttgtacaacaaaacgttccaactgtagaaagagttgattctttaaatgattctactagagcaagattaggcgtgattgctttagctacacaagcgcaagctaatgtcgatttagaaaattctccgcaaaaagaattagcaattactccagaaacattagctaaccgtactgctactgaaactcgtagaggtatcgcaagaatagcaactactgctcaagtgaatcagaacaccacattctcttttgctgatgatattatcatcactcctaaaaagctgaatgaaagaactgctacagaaactcgcagaggtgtcgcagaaattgctacacaacaggaaactaatacaggtactgatgatacaaccatcattactcctaaaaagcttcaagctcgtcaaggttctgaatcattatctggtattgtaacttttgtatctactgcaggtgctactccagcttctagccgtgaattaaatggtacgaatgtttataataaaaacactaataatttagttgtttcgccaaaagctttggatcagtataaagctacgcctactcaacagggtgcagtaattttagcagttgaaagtgaagtaattgctggacagagtcaagaaggatgggcaaatgctgttgtaacgccagaaacgttacataaaaagacatcaactgatggaagaattggtttaattgaaattgctacgcaaagtgaagttaatacaggaactgattatactcgtgcagtcactcctaaaactttaaatgaccgtagagcaactgaaagtttaagtggtatagctgaaattgctacacaagttgaattcgacgcaggcgtcgacgatactcgtatctctacaccattaaaaattaaaactagatttaatagtactgatcgtacttctgttgttgctctatctggattagttgaatcaggaactctctgggaccattatacccttaatattcttgaagcaaatgagacacaacgtggtacacttcgtgtagctacacaagttgaagctgctgcaggaacactagataatgttttaataactcctaaaaagcttttaggtactaaatctactgaagcacaggaaggcgtaattaaggttgctactcaggctgaaactgtaacaggaacttctgctaatactgctgtatctccaaaaaatttaaaatggattgtccagaatgaaccaacatgggctgctactacagcaattcgcggattcgttaaaacttcatctggttctattacatttgttggtaatgatactcaaggtagtacccaggacctgaatctttacgagaaaaatagttatgctatttctccatatgaattaaaccgtgtattagcaaattatttgccattaaaagcaaaagctgctgacgcaaatttattggatggtctagattcatctcagttcattcgtagggatattgcacaaacggttaatggttcactaaccttaacccaacaaacgaatctgagtgcccctcttgtatcatctagtactgctacgtttggtggttctttagctgctaattctacatttactattcgtaatacaggtgcttcaactcgtttgatatttgaaaaaggaccacaaactggaaataacccgtttcaaaccatgaatatccgagtatggggtaaccaattcgctggtggttctgatacaagtcgttcgacagtgcttgaagttggcgatgaaacatcttatcacttttattctcaacgtaataaagacggtaatatagcgtttagcattaatggtactgtaatgccaataaatgttaatgcatccggaacattgaatgcgaacggcgtagcaacatttggtagttcagttactgctaatggcgaattcattagcaagtctgcaaatgctttcagagcaataaatggtgattatggattctttattcgcaatgatgctgctaatacctattttatgcttactgcatccggtgatcagaccggtggatttaatggattacgtcctttggctattaataatgcatctggtcaggttacgattggtgaaggcttaatcattgccaaaggtgttactataaattcaggtggtttgactgttaactcgagaattcgttctcagggtactaaaacagctgatttatatacccgtgcgccaacatctgatactgtaggattctggtcaatcgatattaacgattcagccacttataaccagttcccaggttattttaaaatggttgaaaaaactaatgaagtgactgggcttccatacttagaacgtggcgaagaagttaaatctcctggtacactgactcagtttggtaacacacttgattcgctttaccaagattggattacttatccaacgacgccagaagcgcgtaccactcgctggacacgtacatggcagaaaaccaaaaactcttggtcaagttttgttcaggtatttgatggaggtaaccctcctcaaccatctgatatcggtgctttaccatctgataatgccacaatgggtaatcttactattcgcgatttcttacgaattggtaatgttcgcattattcctgacccagtgaataaatctgttaaatttgaatggattgaataagaggtattatggaaaaatttatggcagagtttggacaaggatatgtccaaacgccatttttatcggaaagtaattcagtaagatacaaaataagtatagcgggttcttgcccgctttctacagcaggaccatacgttaaatttcaggataatcctgtaggaagtcaaacatttagcgcaggccttcatttaagagtttttgacccttccaccggagcattagttgatagtaagtcatatgctttttcgacttcaaatgatactacatcagctgcttttgttagtttcatgaattctttgacgaataatcgaattgtcgctatattaactagtggaaaggttaattttcctcctgaagtagtatcttggttaagaaccgccggaacgtctgcttttccatctgattctatattgtcaagattcgacgtatcatatgctgctttttatacttcttctaaaagagctattgcattagagcatgttaaattaagtaatagaaaaagcacagatgattatcaaactattttagatgttgtatttgacagtttagaagacgtcggagctaccgggtttccaagaagaacgtatgaaagcgttgagcaattcatgtcagcagttggtggaactaataacgaaattgcgcgtttgccaacttcagctgctataagtaaactctctgattataatttaattcctggcgatgttctttatcttaaagctcagttatatgctgatgccgatttacttgctcttggaactacaaatatatccatccgtttttataacgcatctaatggatatatttcctcgacgcaagctgagtttaccgggcaagctgggtcttgggaattaaaggaagattatgtggttgttccagaaaacgctgtcggatttacgatatatgcacaaagaacagcacaagctggccaaggtggcatgagaagtttaagcttttctgaagtgtcaagaaatggaggtatttcgaaacccgctgaatttggcgtcaatggcattcgtgttaattatatctgtgaatccgcttcacctccggatataatggtacttcctacgcaagcatcgtctaaaactggtaaagtgtttgggcaagaatttagagaagtataaattgagggagccttcgggttccctttttctttataaatactattaaaataaaggggcatacaatggctgatttaaaagtaggttcaacaaccggaggctctgtcatttggcatcaaggaaattttccattgaatccagccggtgacgatgtactctataaatcatttaaaatatattcagaatataataaaccgcaagctgctgataacgatttcgtttctaaagctaatggtggtacttacgccgcgactgttcgatttaatggaggagtacatgttcctactataggtagtagtcaacagtgcggtgtttatccaggtaacggtgatgcagctacctttgctatggcaaatattgacatcgtttcgtggaatggtattggttttaaatcatcacaaggttcagcagaccgaactgttgtaattaatgcacgtaatggtgatattagtacaaaaggcgttatgacagcagtaggtcaaataagaagtaatgcagttgctcctgtagcagcgaatgaccttactcgaaaagattatgttgatggagcaataaatactgttacggcaaatgcggattctagagttttccgtaaaggagacactatgactggaaacttaaccgcaccaaactttttctcgcagaatcctgcatctcaaccttcacatgttccacgatttgaccaaatcgtaattaaggattctgttcaagatttcggctattattaagaggacttatggctactttaaaacaaatacaatttaaaagaagcaaaaccgcaggtcaacgtcctgctgcttcagtattagccgaaggtgaattggctataaacttaaaagaccgtactctttttactaaagatgactcgggaaatattattgatttaagcattaccgctggcggtaatattagtggaaatatcactcaaactggcgattatacacagactggaaaatttaatttaattggtccgcaaattgtagcaagcggtggatatattgagtttaattatcgtactactggaagtggggcttgggctggtcaacacactgcaaaagctccaatttttgtagatttaagctcagctacttccacatctgaatataatcctataattaaacagcgctttaaagatggaactttttcattaggtactttagtttctgaaggttcgttgaagattcattatatcaatgaatctggcgattcgaaatattggacgtttcgacgtgacggcggatttgttgttgacggtggaggtttagcagtatcaggaggtagtataactacatctggaaatattgcagctctcggaaatattacttcgcctcagattaatactaaaaatattattttagatacaaaagcatttggacaatacgattcgcaatcattagttcaatatgtttatcctggaacaggtgaagaaaatggtataaactatcttcgtaaagttcgagctaaatcaggcggaaccatttaccatgaaatcgcttcagctcaaaccggtaaaaatgatgaaatttcttggtggactggaaatacacttactactaaattaatgggtcttcgtaatgatggcgcaatggtattacgtcgttcacttgctattggcacaattaccactgacgaaaatactaacaactatggttctcctactccaatgggagaaagatatattgctttgggcgatgctgccactggtttaaaatacattaagcagggtgtttatgatttagtaggtaattggaattctgttgcttctattactcctgatagtttccgtagtactcgtaaagcgttatttggacgttcagaagaccaaggcggaacctggacaatgcctggaacgaatgctgcatttttatcagttcaaacacaggctgatgaaaacagtgctggagacggtcagacacatattggctataattcaggcggaaaaatgaaccactatttccgcggcaaaggcaaaactaatattaatactcaggaaggtatggaagttaatccgggtattttgaaattggtaactggctctaataacgtacagttttatgccgacggaacagtatcttcaatacaaagaattaaatttgataacggattagttcttactggtgctagacccgacggtattcaacttgacgctcctacagcaacagatggcactaaaactatattgtgggccggcggtactcgcccaggtcagaataaaagttatctatctatcaaagcatggggtaatgcctttaatgcatctggcgatcgtgctcgtgaaacagtttttgaagtatcagatggacaaggttaccatttttattctcaacgagttgctcccggatcaggttctaccgtcggacctattcaatttcgagttaatggtggtttattaacttctggtggtattacatcatctggttctattgttactgaatcaagtttagttgcaaataatggattatctgtaaatggtcaggctaaattcggtggaacggcagatgcattaagaatttggaatgccgaatacggtgctattttccgtcgctcagaaacagcattacatattatcccgactcctaaagatgccggtgaaagtggtggaataagtaatctccgcccgctaagtattagtcttaataatggtatggtacaaatgcgccattctgttacgttaggcgatgatggcgctggcggtaatatgattactgtggacaatgacagtaaacttgttgttgttactagtcatagccgcatttctcctaattaccgtatgcaattaggacaagcagcttatattgatgctgaatgcactgatacagtacgtccggccggcgcaggctcttttgcttcccaaaataatgaaaatgtccgtgctccgttctatatgaatattaatagaactgatactagcacatatgttcctattttaaaacagcgatatgttcaaggtaacagctgttattcgttaggcactttaattaatggtggtaactttagagttcattatcatgaaggtggagacggaagttcaacaggcgcagttataaaagatttaggctgggaatttacacgttctggtgattttatatctcctaagcgcatttctgctgggggttcagtttatttaggtacagacggtaacattactggtggttctggtaattttgccaacttaaatagtacaattgaatcacttaaaactgatattgtttcaagttatcctattggagctccgattccttggcctactgatacacctcctgaaggttatgccataatggaaggtcaaacatttgatgttggcttgtatcctaagttagctgcggtgtatccttccggctctctgcctgatatgcgcgggcaaactatcaagggtaaaccatctgggcgtgctgtattaagtacagaagcagacggtgttaagtcacatagtcatagtgcaagtgcatcaagcacggatttgggtactaagaccacatcaagctttgactatggtactaagacgacaagtagtttcgactatggtactaagaccagtaataatactggtgctcatacgcatagtttgagcggttccacaaacaccgccggtgcgcacagccacacaagcgctctttatgcgggaagtaacaactctcctggtactggttctataagaggatccgccggtagtggtaatacgcttggaacttcttcttcttctggggcacattcgcactctatatctggtactgctgcaagcgcaggcgctcacgcgcatactgttggtattggtgctcatacccatactgtaggtatcggtgctcatacccacacggtagcaattggctcgcatggtcatactatcactgtaaatagtacaggtaatacagaaaacacggttaaaaacattgcttttaactatattgttcgtttagcataaggagaggggcttcggccccttctaaatatgaaaatctatcattattattttgacactaaagaattttacaaagaagaaaattacaaacctgttaaaggtctcggtcttcctgctcattcaacaattaaaaaacctttagaacctaaagaaggatacgcagttgtatttgatgaacgtattcaggattggatttatgaagaagaccatcgcggtaaacgggcttggacttttaataaagaagaaatcttaataactgacataggaagcccggttggtataacttttgatgaacccggcgaatttgatatatggactgatgatggttggaaagaagacgaaacatataaacgcgttttaattcgcaatagaaaaattgaagaattatacaaagaattccaagttttaaataatatgattgaagcttctgtcgcgaataaaaaggaaaaattctattataaaaaccttaagcggttctttgctcttttagaaaagcatgagcatttaggtggtgaatttcctaaatggcctgaaaaagaacagaagccttggtataagcgtttattcaagcattacgtataaatatcttaaaaggagggtctatggcagcacctagaatatcattttcgcccttctgatattctatttggtgttctagatcgcttgttcaaagataacgctaccgggaaagttcttgcttcccgggtagctgtcgtaattcttttatttatgatggcgattgtttggtataggggagatagtttctttgagtactataagcaatcaaagtatgaaacatacagtgaaattattgaaaaggaaagaaatgcacgctttgaatctgtcgccctggaacaactccagatagttcatatatcatctgaggcagactttagtgcggtgtattctttccgccctaaaaacttaaactattttgttgatattatagcatacgaaggaagattaccttcaacaataactgaaaaatcacttggaggatatcctgttgataaaactatggatgaatatacagttcatttaaatggacgtcattattattctgactcaaaatttgcttttttaccaactaaaaagcctactcccgaaataaactacatgtacagttgtccatatttcaatttggataatatctatgctggaacaataaccatgtactggtatagaaatgatcatataagtaatgaccgccttgaatcaatatgtgctcaggcggccagaatattaggaagggctaaataattatttgttcgtatacatctctagatatcgatatacaccctcaaaaccctcgttgaattcgtcgatgagggttttcttatcttcttgagttaattcagaaacaattttacggaatgaattctgatttaattttctaccttcatgcgttactccaatctcatttagaaatgcaataaaattagcacgattctcaacaatatcttctctggaaaatttaatcaaaatagatgcaatagtaataatttcacgaactgtatcaatgtttttattcattaactataccactcaattagttgactttgttataatatcatcagacgcttgatttgtaaactggtctgtgttattttcttcaaaaattttttctacgaattctttgaacgactcacgttcctgagctacattatgctcaattaccatttcaagattatgactcattcgaaataatcttcaatttcgtaatcatggacataaatcattatagtttttaatacatcatcgatactttttcctggagctggaattacgtaaaaataccctgcttttgagaggtctttataagttccaatcaagaaatcattattctcaagatgtagttcttcaactaattcattaacaattgagtggtataggtttggtagaaacttatatagcttttctagaatatcaattttgattgtgtattgaactacggactgagaatcaataatcatagaccttccccttatgtttctgtttgcgattagattctttaaacgctttcttcttatccttatgaacagaagctttattaaaattatgctttgcgactaaattgttcatagtgctgaattacctctcttaaacacttgcatgtgaatgagaactttttagctacaccacattcaaatatatgttctcttaaatcacgcgtatcagtatatcccatctcaacaataaaatgccgtattagatttttatctttatcattgagagaattaaaataatcagattttgaattaatttccctggccaaattgaatcaccttcagttgacgttttaattcttttatcatttcttcgttcatcgcaatataaagatcgcgtaaagcaggttttaacattccatttactggagaactaaatgggcatacataatcttttcctacgagctttttggtgaattccatattacagaactgaaatgccggttcattagcataaattccccaattagttgacatcattttattggcatattctagtgcctggatttgattcataattccatcaatttgaaactttttaatattcattagtaaaggtcctcagagtaaagttctttttcactaccaccacgttcaatacgtacttgtccagcgtaagttgcaataatcattgcttcttcacgtgtccaataattactatattggtcaataaacccttggtcatcatcacaaacttgttgagtaactaattgaggtttaactacatctaaaacttctgccatatctttagaataatgacgagcacctggaataataagagttcgtccatcttttaatttaaaccgattagcagcacatacaattcgtcgttgatacttttggttttcatcccaatatgcagtctgccaacagatttcaggaacttctttcagaatatcttcttctgtgcatttataaccgtgtgctttaaatttttgaacaagactttctggagtctcgcgagataaaggaacattcagcatttttaaacgattaacaaacgggttcatttaaaccatcctttaatacgttgccacaaagttttctgttgagctttgttaacaccaattgaacgaataactggttgagattcctggaattctttataatcagcaaggtaaatttcgtaagctgcatccgtaaatgaacttatcgctgccataaaattattacgaatacctactggagcatctttactttcacgaataatcatgtatttaccagtcttaatctttacgatagttccaagataagctccatgataccagatgtcccaaccctcttgggtaggttctgcacaacgacgaagttcattaacaatttctaacttgttcattatttattcctcacagttcagatgctacagtgattactgcttcaatgttttctaccgagcgtttaatgtcaagatacacattaccgtttttagcgattttacatgacattccgatgtcagtaaatttctgaatatgatgttccatcattttgtatccaaaaattcgcatgtttccattgttgttaatttcaaaattacgaattccgtgagtgcgtttttctaaaatggcaagataattactacgataagtttcaacctttttaagaacaaatccattttcatctaaaagttttaacatgaggtctttatcttcttccatatcggaagtaatctcgcgagctttacgagttgctcgttttttcagtagttccggagcattttcctgtgcatataaagttgctgcatttgaaataatatcctgagcttcaccagtaatgattaatccatcaccagatttctccaccaggccttttttaatcaataccccaatattactattaactactgcgttacctaaatctggatgcacctcacgaacttctgcagctgtaatgaaatctttcttagcaatagtaattaaaatcgcagcagttttttcattcagaacatcgttagaagctttgatgatgtaagttactttagacattttctaatctccgtaattctgtatcagtagttgatagttgtatagtaccacagtatgctttggttgtaaaccgttttatgaaaaaatttttgaaataaaaaaagggagagccgaggctctccctaaaattactgcatgactgtgataactgtcatgataacacgttgaatgccgaacgcaagaagacctcctgctacggctggaacaacacctacccccgctagtaaaatgccgccagatactaatgcagcgcttgtaataccaatgaatggactcatttgatttcctctaaatctttagtgtattctgtaactacatcagtagttttccaatattcgttttcttctttttttagctttagcttcttcagcaagtttctttgcttcatcagaagtcatatgaaaaatattcattccaactagtttatcaacataagaagaatacatctcaattttagaaagttcttcggtcagttctttacgagttttaccctgcacaacgatttcacctgaaattactttcttaatgaaatgcgccttggcaaaggctaaacgaaaagcagattcagtttctttaattttgttatcaattcgtttttggacataagttttacgaacttcaacaaagtctttaattaaatcaactacgttatcgtaaacttgtagctttcctttctcattaatgactgtaatattttgggaacgacgctcaatcaacccgaagtctttcataatttttgcatggcgttcttcttcgttatcgctcaaaaaatattctttacggaatttaactttgaacccaaaaccatgctcaccgcaagaatcatcccatgtaatgaagcctttatcttcaagtgggtctaagattttactcacataagtttcacgatcatacttatatggaatctcagtgatatgcatttgagttcgtgaagtaaacttatatgttccacgaatttcatactgcccatcaatttcaacaacttcaccacgaaattctgggaattctaccttcggtttagttactttctttccttgaagagcttgcagtacagctttcttaacagaagaaacactatgaggaagaatgtaagttgcataaccagttgcaataccggaaacgccattaagaagaacagtaggaataataggcaaatagaaagcaggcggaatgtgttctttatcttgatgtaccggagcatattcagtatctttatatacgttatagaaatttttacttacacgagcaaaaatataacgacttgctgctgctttttggacggtacgagaaccaaagtttccttgaccatctaacagaggaaagttattattccaagtgttagccatcaaagcacctgcgtcttgcgcagagttttcaccatgatgatatccaaggtccgctacaccacctgcaatagaagcaagtttgtgaaacttatctttatttcctcgtgccaaatcaagagctcgagcaataacaaatcgttggactggcttaaatccgtcaatcatatttgggatagcacgattttcaaccgtgtacatagcataagccagtgcttcattatcaatgatactttttaaatcgcgattattcagttgcataaatttaccatactagtgaatgtagtgccataataacatcagaaatgaaaagcacgacttgaattaatccgaacattactccataatatagtgctaccaataaagtagcaagggctaatgaatagcccaagattttcttaatcattagtagataacaacacaaatgttaaatatgcacacataccctgggctaaagcttgtgaaaacacactgctagcatcgatacagatagttaaaacacatgctactatccaacaaataaatgaaataactcctaataattttgcaatattcatattttcctcactggcgtccgaagacgcctttagttttaagattattacgatagaactgcatcacgtgttcgttgtggaaattactcattaatatgcctgcaaaacgaatttaaagttatcagccaacatacggttcatttcttcaagtgtttgatactcggaatgatgattacgggtaaacgccaaagctaactgacctttaccaaatcctgtcgtcagaggtttcatcttagaagcaggcagataaaatactgtgtatactatattgttatttgcaatagtacgtgcaagctgagaccgacgttgacgaatatgacttagaactgcactgaatccttgcttagaacgctgattacctacataaaatcgtgctgacacacatggattactaaatagacgaccatctaatttacttactaaaaagtaaaatccaggtttagataaaatatctttatgcggagttcccaaaaaccactcaccacccttgattgtaccaataacagtagcgcctgcattattcagatcagtaacagtcatgtatttcatattaatttcctctaaattattttctactccaaggccgcatgaatacacggccattaaattaatcgtcgcagtcgacgctcaattcccaaaactcttctactgtataagtttcagtatcattttcaatacagaaacgttcattactattatttgctaaagtagcattaactgtcggtttctcgctagtgctcttaagaggtgaaatacgaattaactgatcaccgttatctaaacagaaaatttcaccaacttttacatctttaaaacttttcataattcacctcaaggagtataaaatccaaatgcagttgttgaccatcccatccaatatgggaaatttgcaccaatgtaaaacataagaatataaaaccaaccactcagcaaattcatcattttacaccattccaaattgtttcaaccacagattttaaaccattttgatgaatatccattccgactaccgccatcaaatagattccaactacaactgaacctaaggcaaaaatcagcatgaaaatgaataaagccggaaaaatattatcgaaaaaccattcaataaatgtaaaagcactgcgtttacgcttcatattttcctcacataaatccaaagtaagcgtttaatacatcaatcattaaaacgattgggaatatactcaaaactactagtattataactacattccatacagctttaacaatctttttcattttctgttcctccgtagttgatagggtaataataccacagaggaacagtcttgtaaacaacttttttaaaaatattcgtaataaatgtgaataccaactactaccgctgaaacctgtgcaacccaccacgcacaagcaataagtacagaattcaaaattttcataataacctcattacaaaagtaaatgttaaacaaattactggaatactaattaaccaaacaaaacaccaccatagtgaactcatagctcaatctcagcgattttcatttcattactattaatagctgctttaagactatctgaaagaattacattccagtggtcattcatatgaccattaactaagcgtgtaatttcttcgggagttgaaaaataaggcgtatcagactcccaatgcgatagtcccaagcgagtataaatcataccttcatcatcgctagaatattcaactgacacaaactcatcagttattttatgtttagcgtaataaaatttaaatttcattttattctccaaatccgtatcagtagttgatagttgtataataccacggtccttgtggtatgtaaaccgttttgtgaaaatttttaaatggaaagataccagccgttgtagttgctttttcttacaaccttacgaaggtcttctctatcaccaatgaacttcggagtgtactggatgacacctggatgaatttctttagtgttgaatataattatacagtcagcgacttgatgatttagaatgggccctaaatttattccagaaccatatggatactctccgctgcatcccgttgttaccgaaatccaacgcgagtcagtttgatgtgtcttaacttctacacgaagcccacagtattttggatgtgctaaaacatcccatgcatatgtgtacggatcatcgacatcttcttggcctttattgacatatccgcttagccaatctgccacaaaaaactctgcgtacacagcgatacggcatctttcgataacttctgccttatcctgatttggattttgttttaaagagtatcttgctgtatcagcaattttgaccttcatttcactagtcaagtcactgttcgatagggtaaatgtcggaatctgaaatagtctctgtaaacccggattcgttttctgcattaaactttccttttacgtcggaatcactgatattcatacaaaatcatagtttcccttaaaacaaaagggccgaagcccttatttatttgaattgtgcaattcttttctctaaacattcagcataagatttcattgagatgaactgtgaaagtagcagttcttgctcaactgcactaaccgttagaaactttgtgctttctaaaaatttactcagtgcattaattttgagcattaattgatcgtattcttcttttactcgtgcttgataacctaacataattttccttagttaagggccgaagcccttatttaaattgttcagtaacgtcttcaactacttcgtattggcaggtacgcattttagcatcgttgtaatcaatcggaattgatactacatcgcgtggatgtactttaacttttacaactcggctggttgaaccaccgaagtgacgaatataagatttagaacacacatgcagaccacgagaacaagtttgtgtatcatcgtcattcacacgagtacgcggcattttaactactttacccggactgttatcaaaggtgtttgagtgacagtcaaagtaattgctgcgaactactttccaagcatagaagtaaccatcttctgtaatttcaatatcgtttgctaccaagaaatcaaagagtcgagataccgctttttggcttgggttttccagcagattttccaagaacggaaaataaaattcaaagttttcgcctttttccatcgagtcaagaatacgatcaaccaaaccagaccgcaattcgatattttgatagaacaagcttccaccttcaattcgaacatcgccggaaatatatttttcaacagcacggcgaacattaattttttgtgcagcttcttccagcttatccgctacaagcagattaagaatttcctggaagtttgaatgagtattaggagttgcgttataagttacaccgtcaacagtaattgaaatgaattttttagatgcattccaaataatgtcagatttagcaactggagcaataactgcatcgctattaactttaactgtaatatcaccgctaatagtaactttagagcgtttagcttcttcagcatttttcaaaacacgacggattgtgtcaaccgatacaccttgccaatcagccaattcctgttgggtgtaattaccacttgaatacaatttaacaatttcagattgttcgtttttggtcaggcatttaatattgtacataattttcctta
